(19) United States
(12) Patent Application Publication
(10) Pub. No.: US 2005/0026156 A1
(43) Pub. Date: Feb. 3, 2005

(54) Verification of food origin based on nucleic acid pattern recognition

(76) Inventors: Oystein Lie, Oslo (NO); Audun Slettan, Holum (NO); Morten Hoyum, Ski (NO); Frode Lingaas, Fagernes (NO)

Correspondence Address: Cathryn Campbell;McDERMOTT, WILL & EMERY, 7th Floor, 4370 La Jolla Village Drive, San Diego, CA, 92122, US

(21) Appl. No.: 10/643,775

(22) Filed: Aug. 18, 2003

Related U.S. Application Data
(60) Provisional application No. 60/404,200, filed on Aug. 16, 2002.

(51) Int. Cl. C12Q 1/68; C07H 21/04

(52) U.S. Cl. 435/6; 536/23.2; 536/24.3

(57) ABSTRACT

This invention is directed to isolated nucleic acid molecules that encompass a single nucleotide polymorphism (SNP) associated with fish. The present invention further is directed to isolated nucleic acid molecules that encompass a microsatellite sequence associated with fish. The invention further is directed to a method of determining the parentage origin of a fish sample (or a sample from any biological species with similar organization of reproduction as fish) by providing a parentage genotype database that contains a collection of candidate parent genotypes that each represent a distinct parentage origin and comparing a sample genotype to the parentage genotype database, such that a match between a sample genotype and one of the candidate parent genotypes identifies the parentage origin of the sample.

[0001] This application claims benefit of the filing date of U.S. Provisional Application No. 60/404,200, filed Aug. 16, 2002, and which is incorporated herein by reference.

### BACKGROUND OF THE INVENTION

[0002] This invention relates generally to applied genomics methods and, more specifically, to methods for determining the source of a fish sample.

[0003] Increased focus has been placed on healthy food, and consumers are increasingly concerned with core issues such as sustainable and environmentally safe harvest and production processes, the use of drugs and feed additives as well as the welfare of the production animals. Governmental authorities, seafood retail traders and consumers presently have no available system to verify whether the production process is in accordance with information provided, whether the product has the origin as claimed or whether, for example, a fillet in the supermarket has the correct brand name.

[0004] Seafood operators are becoming increasingly aware of the importance of implementing quality control mechanisms together with traceability systems for the purpose of establishing verifiable substance in order to protect their products and brand names. Similarly, retailers and consumers want to be able to check whether they have received the desired product or brand in accord with the claimed quality.

[0005] Presently existing traceability systems are unreliable as they depend on “paper flow” along the value chain to provide information regarding origin; production parameters; processing time, date and environment; and transport. Consequently, there is a need for an authenticity system verifying the origin of products at high speed and low cost.

[0006] Several reasons support the need of a genetic online traceability system. First, consumers growing concern with regard to core issues like the health risk of consuming a particular product. Furthermore, consumers are increasingly concerned with whether a product has been subjected to resource and environmentally friendly harvest and production as well as with animal welfare issues. In addition to these consumer demands, recent regulations passed in the United States and the European Union focus on environmentally friendly harvest and production. Significantly, each of the foregoing issues is related to product origin.

[0007] Thus, there exists a need for genetic markers that can be used to unambiguously and reliably identify the origin of a fish sample and for methods to efficiently determine the origin of a fish sample using such markers. The present invention satisfies this need and provides related advantages as well.

### SUMMARY OF THE INVENTION

[0008] This invention is directed to isolated nucleic acid molecules that encompass a single nucleotide polymorphism (SNP) associated with fish. The present invention further is directed to isolated nucleic acid molecules that encompass a microsatellite sequence and corresponding primers associated with fish. The invention also provides nucleotide sequences corresponding to Polymerase Chain Reaction (PCR) primers, Oligonucleotide Ligation Assay (OLA) primers. The nucleotide sequences provided by the present invention are described below and set forth in FIGS. 1 through 9 and 11.

[0009] The invention further is directed to a method of determining the parentage origin of a fish sample by providing a parentage genotype database that contains a collection of candidate parent genotypes that each represent a distinct parentage origin and comparing a sample genotype to the parentage genotype database, such that a match between a sample genotype and one of the candidate parent genotypes identifies the parentage origin of the sample. The invention also provides a method of determining the origin of a fish sample by providing an origin genotype database encompassing a collection of candidate genotype profiles, wherein each of the candidate genotype profiles represents a distinct population of origin; and comparing a sample genotype to the candidate genotype profiles, wherein a match between the sample genotype and one of the candidate genotype profiles identifies the population of origin of the sample.

### BRIEF DESCRIPTION OF THE DRAWINGS

[0010] FIG. 1 shows the nucleotide sequences of Salmo salar Single Nucleotide Polymorphisms (SNPs) (SEQ ID NOS:) and corresponding OLA primers (SEQ ID NOS:).

[0011] FIG. 2 shows the nucleotide sequences of Polymerase Chain Reaction (PCR) primers corresponding to Salmo salar Single Nucleotide Polymorphisms (SNPs) (SEQ ID NOS:).

[0012] FIG. 3 shows the nucleotide sequences of Salmo salar microsatellites (SEQ ID NOS:).

[0013] FIG. 4 shows the nucleotide sequences of Orechromis niloticus Single Nucleotide Polymorphisms (SNPs) (SEQ ID NOS:) and corresponding OLA Primers (SEQ ID NOS:) and corresponding SNP primers (SEQ ID NOS:).

[0014] FIG. 5 shows the nucleotide sequences of Orechromis niloticus microsatellites (SEQ ID NOS:).

[0015] FIG. 6 shows the nucleotide sequences of Orechromis niloticus polymorphic sites (SEQ ID NOS:).

[0016] FIG. 7 shows the nucleotide sequences of Atlantic halibut Single Nucleotide Polymorphism (SNPs) (SEQ ID NOS:).

[0017] FIG. 8 shows the nucleotide sequences of cod polymorphic sites (SEQ ID NOS:).

[0018] FIG. 9 shows the nucleotide sequences of seabass polymorphic sites (SEQ ID NOS:).

[0019] FIG. 10 shows a schematic illustration of the invention method for determining the parentage origin of a fish sample.

[0020] FIG. 11 shows nucleotide sequences representing (SEQ ID NOS:), which correspond to Oreochromis niloticus microsatellites and corresponding primers.

### DETAILED DESCRIPTION OF THE INVENTION

[0021] This invention is directed to isolated nucleic acid molecules that encompass a single nucleotide polymorphism (SNP) associated with several distinct species of fish. The present invention further is directed to isolated nucleic acid molecules that encompass a microsatellite sequence associated with several distinct species of fish. Also provided are methods for determining the parentage origin or population of origin of a sample based on matching of genetic markers.

[0022] As used herein, the term “fish,” refers to organisms falling into one of two groups, “cartilagenous fish” or class Chondrichthyes and “bony fish” or class Osteichthyes (formerly class name, but still widely used). Most of the modern Osteichthyes belong the order Teleostei.

[0023] In one embodiment, the invention provides an isolated nucleic acid molecule encompassing a single nucleotide polymorphism (SNP), where the isolated nucleic acid molecule is selected from the group designated SEQ ID NOS: [ ], which correspond to the order Salmoniformes, family Salmonidae, genus Salmo and species Salmo salar. Also provided are a nucleic acid molecules that hybridize to the nucleic acid molecule of selected from the group designated SEQ ID NOS: [ ] or its complement under highly stringent hybridization conditions.

[0024] As used herein, the term “salmon,” refers to organisms belonging to the order Salmoniformes, family Salmonidae, genus Salmo and species Salmo salar. All salmonids live in freshwater or migrate into freshwater to spawn in the streams of their origins. Salmo salar is the main species in northern Europe and North America and also the main species of farmed salmon. Worldwide production of farmed salmon has exceeded 800 000 tons per year.

[0025] In a further embodiment, the invention provides an isolated nucleic acid molecule encompassing a single nucleotide polymorphism (SNP), where the isolated nucleic acid molecule is selected from the group designated SEQ ID NOS: [ ], which correspond to the order Perciformes, family Cichlidae, genus Oreochromis and species Oreochromis niloticus. Also provided are nucleic acid molecules that hybridize to the nucleic acid molecule selected from the group designated SEQ ID NOS: [ ] or its complement under highly stringent hybridization conditions.

[0026] As used herein, the term “tilapia,” refers to organisms belonging to the order Perciformes, family Cichlidae, genus Oreochromis. The species Oreochromis niloticus is the most common tilapia species in modern aquaculture and the majority of isolated nucleotide sequences set forth herein correspond to this species. Most tilapia species belonging to the genus Oreochromis are closely genetically related. Individuals from different tilapia species freely mate with each other, thus making species hybrids that are fertile and often with good production qualities. Furthermore, genetic markers isolated from one tilapia species be used with distinct tilapia species or tilapia hybrids. Therefore, the term “tilapia” refers to organisms belonging to the genus Oreochromis in general.

[0027] Tilapia are a group of perch-like fishes of the Cichlidae family that are native to the freshwaters of tropical Africa and represent one of the most important aquatic species in culture today. World-wide production of tilapia exceeds 1 billion pounds per year and production of tilapia in the United States is increasing rapidly.

[0028] The invention provides isolated nucleic acid molecules that encompass a microsatellite sequence associated with several distinct species of fish. In such an embodiment, the invention provides an isolated nucleic acid molecule encompassing a microsatellite sequence, where the isolated nucleic acid molecule is selected from the group designated SEQ ID NOS: [ ], which correspond to the salmon. Also provided are nucleic acid molecules that hybridize to the nucleic acid molecule selected from the group designated SEQ ID NOS: [ ] or its complement under highly stringent hybridization conditions.

[0029] In yet another embodiment, the invention provides an isolated nucleic acid molecule encompassing a microsatellite sequence, where the isolated nucleic acid molecule is selected from the group designated SEQ ID NOS: [ ], which correspond to the tilapia. Also provided are nucleic acid molecules that hybridize to the nucleic acid molecule selected from the group designated SEQ ID NOS: [ ] or its complement under highly stringent hybridization conditions.

[0030] In yet another embodiment, the invention provides an isolated nucleic acid molecule encompassing a microsatellite sequence, where the isolated nucleic acid molecule is selected from the group designated SEQ ID NOS: [ ], which correspond to the halibut.

[0031] As used herein, the term “halibut” refers to organisms that belong the order Pleuronectiformes, family Pleuronectidae, and genus Hippoglossus and species Hippoglossus hippoglossus, a large saltwater flatfish that can be up to 4 meters in length and is found in the North Atlantic and North Eastern Pacific.

[0032] Also provided are nucleic acid molecules that hybridize to the nucleic acid molecule selected from the group designated SEQ ID NOS: [ ] or its complement under highly stringent hybridization conditions.

[0033] In a further embodiment, the invention provides an isolated nucleic acid molecule encompassing a microsatellite sequence, where the isolated nucleic acid molecule is selected from the group designated SEQ ID NOS: [ ], which correspond to the seabass. Also provided are a nucleic acid molecules that hybridize to the nucleic acid molecule of selected from the group designated SEQ ID NOS: [ ] or its complement under highly stringent hybridization conditions.

[0034] As used herein, the term “seabass” refers to organisms that belong the order Perciformes, the family Serranidae, and include the black sea bass Centropristis, as well as organisms belonging to the family Moronidae, in particular, the European sea bass Dicentrarchus laborax.

[0035] In another embodiment, the invention provides an isolated nucleic acid molecule encompassing a microsatellite sequence, where the isolated nucleic acid molecule is selected from the group designated SEQ ID NOS: [ ], which correspond to the cod. Also provided are a nucleic acid molecules that hybridize to the nucleic acid molecule of selected from the group designated SEQ ID NOS: [ ] or its complement under highly stringent hybridization conditions.

[0036] As used herein, the term “cod” refers to the Atlantic cod, which belongs to the order Gadiformes, family Gadidae, species Gadus morhua, and is a saltwater fish found in the North Atlantic above 45° N.

[0037] The isolated nucleic acid molecules of the invention encompassing SNPs and microsatellite sequences as set forth above represent genetic markers that can be used, for example, to genotype fish and are useful as components of a parentage genotype database in the methods of the invention to determine the origin of a fish sample. Furthermore, the invention provides isolated nucleic acid molecules that can be used, for example, as probes to detect the presence of one or more genetic markers in fish samples and in other screening applications known to those skilled in the art.

[0038] The invention further is directed to a method of determining the parentage origin of a fish sample by providing a parentage genotype database that contains a collection of candidate parent genotypes, also referred to as candidate origin genotypes, that each represent a distinct parentage origin and comparing a sample genotype to the parentage genotype database, such that a match between a sample genotype and one of the candidate parent genotypes identifies the parentage origin of the sample.

[0039] The ability to identify the parentage origin of a fish sample via the methods provided by the present invention allows for improved quality control mechanisms in commercial aquaculture. Genetic markers, for example, an insertion, deletion, rearrangement, single nucleotide polymorphism (SNP), a microsatellite (MS) or a variable number tandem repeat (VNTR) polymorphism, are important tools that allow identification of the parentage origin using the methods provided by the invention. The present invention provides the benefit of allowing direct identification of the parentage individuals or origin population rather than indirect identification merely based on the assignment of a sample to a population based on the matching of genetic profiles based on gene frequencies, a traditionally used method based on the statistical guess that an individual with a specific genetic makeup or genotype belongs to a specific population with a specific gene frequency at those loci. In contrast, the invention method establishes parentage by matching offspring or sample genotype with a set of pre-typed panels corresponding to potential parent or origin genotypes. Thus, the present invention represents a significant improvement over traditional identification methods based on population genetics.

[0040] The methods of the invention exemplified herein for an origin or parentage determination of a fish sample are equally applicable to a variety of other organisms and biomaterials. A unique aspect of the invention method, in addition to the particular compositions provided by the invention, is the employment of large-scale parentage or origin analysis based on checking a sample genotype against a parentage or origin genotype database and by that be able to determine which parent pair the particular individual originates from. The invention methods distinguish from traditional tracing systems of livestock, for example, cattle, which is based on individually comparing samples with origin candidates rather than by comparison against an exhaustive origin database.

[0041] Due to their high biological capacity for reproduction (fecundity), fish provide an especially appropriate target for practicing the methods of the invention. For example, a female salmon breeder can produce up to 10,000 offspring and some shellfishes have millions of offspring. In particular, genotyping a female salmon breeder and its male partner provides the ability to verify the origin of 40 metric tons of seafood. Regardless of the additional benefits conferred upon the methods of the invention by virtue of the fecundity of fish, the methods are nevertheless also applicable to other biomaterials containing nucleic acid based on the genotyping and subsequent establishment of parentage/origin genotype databases and comparison of a sample genotype against such a database.

[0042] The invention further provides an isolated nucleic acid molecule that hybridizes to the nucleic acid molecule encompassing a SNP designated SEQ ID NOS: [ ], or its complement under stringent conditions. In one embodiment, the isolated oligonucleotide comprises at least 17 contiguous nucleotides of SEQ ID NOS: [ ], or the complement thereof. Such an oligonucleotide is able to specifically hybridize to a complementary nucleic acid molecule under highly stringent hybridization conditions.

[0043] Further provided are isolated oligonucleotides containing at least 17 contiguous nucleotides of a SNP-containing nucleic acid molecule or of its complement. Also provided are isolated oligonucleotides containing at least 17 contiguous nucleotides of a microsatellite sequence-containing nucleic acid molecule or of its complement. An isolated oligonucleotide can thus contain at least 18, 19, 20, 22, or at least 25 contiguous nucleotides, such as at least 30, 40, 50, 60, 70, 80, 90, 100, 125, 150, 175, 200, 225, 250, 275, 300, 350, 400, 500, 600, 700, 800 or more contiguous nucleotides from the reference nucleotide sequence, up to the full length sequence. An invention oligonucleotide can be single or double stranded, and represent the sense or antisense strand.

[0044] In one embodiment, the isolated oligonucleotide comprises at least 17 contiguous nucleotides of the SNP-containing designated SEQ ID [ ], or the complement thereof. In a further embodiment, the isolated oligonucleotide comprises at least 17 contiguous nucleotides of the SNP-containing designated SEQ ID [ ], or the complement thereof. Such oligonucleotides are able to specifically hybridize to a SNP-containing nucleic acid molecule under highly stringent hybridization conditions.

[0045] In a further embodiment, the isolated oligonucleotide comprises at least 17 contiguous nucleotides of the microsatellite sequence-containing nucleic acid molecule designated SEQ ID [ ], or the complement thereof. The invention also provides an isolated oligonucleotide containing at least 17 contiguous nucleotides of the microsatellite sequence-containing nucleic acid molecule designated SEQ ID [ ], or the complement thereof. In a further embodiment, the isolated oligonucleotide comprises at least 17 contiguous nucleotides of the microsatellite sequence-containing nucleic acid molecule designated SEQ ID [ ], or the complement thereof. In a further embodiment, the isolated oligonucleotide comprises at least 17 contiguous nucleotides of the microsatellite sequence-containing nucleic acid molecule designated SEQ ID [ ], or the complement thereof. In a further embodiment, the isolated oligonucleotide comprises at least 17 contiguous nucleotides of the microsatellite sequence-containing nucleic acid molecule designated SEQ ID [ ], or the complement thereof. Such oligonucleotides are able to specifically hybridize to a microsatellite sequence-containing nucleic acid molecule under highly stringent hybridization conditions.

[0046] Thus, the invention oligonucleotides can be advantageously used, for example, as probes to detect SNP-containing nucleic acid molecules and microsatellite sequence-containing nucleic acid molecules in a sample; as sequencing or PCR primers; or in other applications known to those skilled in the art in which hybridization to a SNP-containing nucleic acid molecule and a microsatellite sequence-containing nucleic acid molecule is desirable.

[0047] In one embodiment, the invention provides a primer pair containing an isolated oligonucleotide containing at least 17 contiguous nucleotides of a SNP-containing nucleic acid molecule and an isolated nucleic acid molecule containing at least 17 contiguous nucleotides of the complement of SNP-containing nucleic acid molecule of the invention. In a further embodiment, the invention provides a primer pair containing an isolated oligonucleotide containing at least 17 contiguous nucleotides of a microsatellite sequence-containing nucleic acid molecule and an isolated nucleic acid molecule containing at least 17 contiguous nucleotides of the complement of a microsatellite sequence-containing nucleic acid molecule of the invention. The primer pairs provided by the invention can be used, for example, to amplify a nucleic acid molecule by the polymerase chain reaction (PCR). The skilled person can determine an appropriate primer length and sequence composition for the intended application.

[0048] The present invention further provides isolated nucleic acid molecules encompassing a microsatellite sequence associated with tilapia and set forth as SEQ ID NOS: [ ]; isolated nucleic acid molecules encompassing a microsatellite sequence associated with Atlantic salmon and set forth as SEQ ID NOS: [ ]; isolated nucleic acid molecules encompassing a microsatellite sequence associated with halibut and set forth as SEQ ID NOS: [ ] isolated nucleic acid molecules encompassing a microsatellite sequence associated with cod and set forth as SEQ ID NOS: [ ]; and isolated nucleic acid molecules encompassing a microsatellite sequence associated with seabass and set forth as SEQ ID NOS: [ ]. The isolated nucleic acid molecules designated SEQ ID NOS: [ ] [ALL] encompass microsatellite sequences of the above-named species. The invention further provides oligonucleotides that hybridize to the nucleic acid molecules set forth as SEQ ID NOS: [ ].

[0049] The term “isolated,” in reference to an invention nucleic acid molecule is intended to mean that the molecule is substantially removed or separated from components with which it is naturally associated, or is otherwise modified by the hand of man, thereby excluding nucleic acid molecules as they exist in nature.

[0050] The term “nucleic acid molecule,” as used herein, refers to an oligonucleotide or polynucleotide of natural or synthetic origin. A nucleic acid molecule can be single- or double-stranded genomic DNA, cDNA or RNA, and can represent the sense strand, the antisense strand, or both. A nucleic acid molecule can include one or more non-native nucleotides, having, for example, modifications to the base, the sugar, or the phosphate portion, or having a modified phosphodiester linkage. Such modifications can be advantageous in increasing the stability of the nucleic acid molecule. Furthermore, a nucleic acid molecule can include, for example, a detectable moiety, such as a radiolabel, a fluorochrome, a ferromagnetic substance, a luminescent tag or a detectable binding agent such as biotin. Such modifications can be advantageous in applications where detection of a hybridizing nucleic acid molecule is desired.

[0051] As used herein, a “probe” or “oligonucleotide” is single-stranded or double-stranded DNA or RNA, or analogs thereof, that has a sequence of nucleotides that includes at least 15, at least 20, at least 50, at least 100, at least 200, at least 300, at least 400, or at least 500 contiguous bases that are the same as (or the complement of) any contiguous bases set forth in any of SEQ ID NOS: [ ]. Oligonucleotides are useful, for example, as probes or as primers for amplification reactions such as the polymerase chain reaction (PCR). In addition, oligonucleotides can bind to the sense or anti-sense strands of other nucleic acids. Preferred regions from which to construct a probe include those nucleic acid sequences that contain the SNP or a microsatellite. Probes can be labeled by methods well-known in the art, as described hereinafter, and used in various diagnostic kits.

[0052] As used herein, the term “single nucleotide polymorphism” or “SNP” is intended to mean a difference in nucleotide sequence between two related nucleic acid molecules of one nucleotide at a specified-position. The term refers to a nucleotide substitution at a particular position compared to an otherwise identical nucleic acid sequence at adjacent nucleotide positions. Therefore, the term refers to a relative difference in primary structure between two compared nucleic acid molecules that are substantially related.

[0053] As used herein, the term “microsatellite” or “microsatellite sequence” is intended to refer to a tandem repeat sequence that is either present or varies in length at a particular position compared to an otherwise identical nucleic acid sequence at the same nucleotide positions.

[0054] Eucaryotic genomes contain a large number of single nucleotide polymorphisms, which make it easy to look for allelic versions of a gene by sequencing samples of the gene taken from different members of a population or from a heterozygous individual. Similarly, eucaryotic genomes contain a large number of interspersed simple tandem repeat sequences, designated microsatellites, which vary in length among individuals. SNPs and microsatellites represent highly informative polymorphic markers that can be typed, for example, using the polymerase chain reaction (PCR). Such polymorphic sequence variants further can be detected using the oligonucleotide ligation assay (OLA) as described in Example 2, or other appropriate detection method known in the art.

[0055] The invention nucleic acid molecules and oligonucleotides can be advantageously used, for example, as probes to detect nucleic acid molecules encompassing a particular single nucleotide polymorphism in a sample; as probes to detect nucleic acid molecules encompassing a particular microsatellite sequence in a sample; as sequencing or PCR primers; or in other applications known to those skilled in the art in which hybridization to an invention nucleic acid molecule is desirable.

[0056] Hybridization refers to the binding of complementary strands of nucleic acid, for example, sense:antisense strands or probe:target-DNA, to each other through hydrogen bonds, similar to the bonds that naturally occur in chromosomal DNA. Stringency levels used to hybridize a given probe with target-DNA can be readily varied by those of skill in the art.

[0057] Stringent hybridization are conditions under which polynucleic acid hybrids are stable. As known to those of skill in the art, the stability of hybrids is reflected in the melting temperature (Tₘ) of the hybrids. In general, the stability of a hybrid is a function of sodium ion concentration and temperature. Typically, the hybridization reaction is performed under conditions of lower stringency, followed by washes of varying, but higher, stringency. Reference to hybridization stringency relates to such washing conditions.

[0058] Specific hybridization refers to the ability of a nucleic acid molecule to hybridize to the reference nucleic acid molecule without hybridization under the same conditions with nucleic acid molecules that are not the reference molecule. Under moderately stringent hybridization conditions the hybridized nucleic acids will generally have at least about 60% identity, at least about 75% identity, more at least about 85% identity; or at least about 90% identity. Moderately stringent conditions are conditions equivalent to hybridization in 50% formamide, 5× Denhart's solution, 5×SSPE, 0.2% SDS at 42° C., followed by washing in 0.2×SSPE, 0.2% SDS, at 42° C. In contrast, high stringency hybridization conditions can be provided, for example, by hybridization in 50% formamide, 5× Denhart's solution, 5×SSPE, 0.2% SDS at 42° C., followed by washing in 0.1×SSPE, and 0.1% SDS at 65° C. Low stringency hybridization conditions include hybridization in 10% formamide, 5× Denhart's solution, 6×SSPE, 0.2% SDS at 22° C., followed by washing in 1×SSPE, 0.2% SDS, at 37° C. Denhart's solution contains 1% Ficoll, 1% polyvinylpyrolidone, and 1% bovine serum albumin (BSA). 20×SSPE (sodium chloride, sodium phosphate, ethylene diamide tetraacetic acid (EDTA)) contains 3M sodium chloride, 0.2M sodium phosphate, and 0.025 M (EDTA). Other suitable moderately stringent and highly stringent hybridization buffers and conditions are well known to those of skill in the art and are described, for example, in Sambrook et al., Molecular Cloning: A Laboratory Manual, 3rd ed., Cold Spring Harbor Press, Plainview, N.Y. (2001) and in Ausubel et al. (Current Protocols in Molecular Biology (Supplement 47), John Wiley & Sons, New York (1999)).

[0059] Nucleic acid molecules of the invention hybridize under moderately stringent or highly stringent conditions to substantially the entire sequence, or substantial portions, for example, typically at least 15, 17, 21, 25, 30, 40, 50 or more nucleotides of the nucleic acid sequence set forth in SEQ ID NOS: [ ].

[0060] An invention nucleic acid molecule or oligonucleotide containing a single nucleotide polymorphism or a microsatellite sequence can further contain nucleotide additions or additional nucleotide sequences including, for example, sequences that facilitate identification of the oligonucleotide.

[0061] The invention also provides an isolated nucleic acid probe that specifically hybridizes to and detects nucleic acid sequence encompassing a SNP, wherein the SNP is selected from the group consisting of SEQ ID NOS: [ ]. The invention also provides an isolated nucleic acid probe that specifically hybridizes to and detects nucleic acid sequence encompassing a SNP, wherein the SNP is selected from the group consisting of SEQ ID NOS: [ ]. An isolated nucleic acid probe of the invention contains at least approximately 17 contiguous nucleotides of the complement of a SNP nucleic acid molecule of the invention. The probe can be used, for example, to detect the presence of a SNP-containing nucleic acid molecule in a sample. The skilled person can determine an appropriate probe length and sequence composition for the intended application.

[0062] The invention also provides an isolated nucleic acid probe that specifically hybridizes to and detects nucleic acid sequence encompassing a SNP, wherein the nucleic acid sequence is selected from the group consisting of SEQ ID NOS: [ ]. The invention further provides an isolated nucleic acid probe that specifically hybridizes to and detects nucleic acid sequence encompassing a SNP, wherein the nucleic acid sequence is selected from the group consisting of SEQ ID NOS: [ ]. The invention also provides an isolated nucleic acid probe that specifically hybridizes to and detects nucleic acid sequence encompassing a microsatellite sequence, wherein the nucleic acid sequence is selected from the group consisting of SEQ ID NOS:[ ]. As described herein, an isolated nucleic acid probe of the invention contains at least approximately 17 contiguous nucleotides of the complement of a SNP-containing nucleic acid molecule of the invention or a microsatellite-containing nucleic acid molecule of the invention. The probe can be used, for example, to detect the presence of a SNP-containing nucleic acid molecule or a microsatellite-containing nucleic acid molecule in a sample. The skilled person can determine an appropriate probe length and sequence composition for the intended application.

[0063] An isolated nucleic acid molecule or oligonucleotide of the invention can be produced or isolated by methods known in the art. The method chosen will depend, for example, on the type of nucleic acid molecule one intends to isolate. Those skilled in the art, based on knowledge of the nucleotide sequences disclosed herein, can readily isolate the isolated nucleic acid molecules as genomic DNA; as full-length cDNA or desired fragments therefrom; or as full-length mRNA or desired fragments therefrom, by methods known in the art.

[0064] An invention nucleic acid molecule does not consist of the exact sequence of a nucleotide sequence set forth in publically available databases, such as Expressed Sequence Tags (ESTs), Sequence Tagged Sites (STSs) and genomic fragments, deposited in public databases such as the nr, dbest, dbsts and gss databases, and TIGR, SANGER center, WUST1 and DOE databases.

[0065] One useful method for producing an isolated nucleic acid molecule of the invention involves amplification of the nucleic acid molecule using the polymerase chain reaction (PCR) and specific primers and, optionally, purification of the resulting product by gel electrophoresis. Either PCR or reverse-transcription PCR (RT-PCR) can be used to produce a nucleic acid molecule having any desired nucleotide boundaries. Desired modifications to the nucleic acid sequence can also be introduced by choosing an appropriate primer with one or more additions, deletions or substitutions. Such nucleic acid molecules can be amplified exponentially starting from as little as a single gene or mRNA copy, from any cell, tissue or species of interest.

[0066] Furthermore, an isolated nucleic acid molecule or oligonucleotide of the invention can be produced by synthetic means. For example, a single strand of a nucleic acid molecule can be chemically synthesized in one piece, or in several pieces, by automated synthesis methods known in the art. The complementary strand can likewise be synthesized in one or more pieces, and a double-stranded molecule made by annealing the complementary strands. Direct synthesis is particularly advantageous for producing relatively short molecules, such as oligonucleotide probes and primers, and nucleic acid molecules containing modified nucleotides or linkages.

[0067] Genetic markers, for example, an insertion, deletion, rearrangement, SNP, microsatellite or variable number tandem repeat (VNTR) polymorphism, are important tools that allow identification of the parentage origin using the methods provided by the invention. For example, the presence in a fish sample of a nucleic acid molecule of the invention containing a SNP or a microsatellite sequence is indicative of the origin of the sample. Thus, the invention provides methods for detecting a nucleic acid molecule containing a SNP or a microsatellite in a fish sample. This information can be useful, for example, to determine the origin of the fish sample.

[0068] In one embodiment, the method is practiced by contacting a sample containing nucleic acids with one or more oligonucleotides containing contiguous sequences from a SNP-containing nucleic acid molecule of the invention, under high stringency hybridization conditions, and detecting a nucleic acid molecule that hybridizes to the oligonucleotide. In an alternative embodiment the method is practiced by contacting a fish sample with a primer pair suitable for amplifying a SNP-containing nucleic acid molecule of the invention, amplifying a nucleic acid molecule using polymerase chain reaction, and detecting the amplification.

[0069] As used herein, the term “sample” is intended to mean any biological fluid, cell, tissue, organ or portion thereof, or any environmental sample (e.g. soil, food, water, effluent and the like) that contains or potentially contains a SNP-containing nucleic acid molecule of the invention. For example, a sample can be an egg, a section obtained from a commercially sold fish filet, breeder, smelt, slaughtered fish, or can be a subcellular fraction or extract, or a crude or substantially pure nucleic acid preparation. A sample can be prepared by methods known in the art suitable for the particular format of the detection method employed. A sample can correspond to an individual fish or can correspond to more than one individual.

[0070] The methods of detecting a nucleic acid molecule in a sample can be either qualitative or quantitative, and can detect the presence, abundance, integrity or structure of the nucleic acid molecule as desired for a particular application. Suitable hybridization-based assay methods include, for example, in situ hybridization, which can be used to detect altered chromosomal location of the nucleic acid molecule, altered gene copy number, and RNA abundance, depending on the assay format used. Other hybridization methods include, for example, Northern blots and RNase protection assays, which can be used to determine the abundance and integrity of different RNA splice variants, and Southern blots, which can be used to determine the copy number and integrity of DNA. A hybridization probe can be labeled with any suitable detectable moiety, such as a radioisotope, fluorochrome, chemiluminescent marker, biotin, or other detectable moiety known in the art that is detectable by analytical methods.

[0071] Suitable amplification-based detection methods are also well known in the art, and include, for example, qualitative or quantitative polymerase chain reaction (PCR); reverse-transcription PCR (RT-PCR); single strand conformational polymorphism (SSCP) analysis, which can readily identify a single point mutation in DNA based on differences in the secondary structure of single-strand DNA that produce an altered electrophoretic mobility upon non-denaturing gel electrophoresis.

[0072] The invention also provides a method of determining the origin of a fish sample by providing a parentage genotype database encompassing a collection of candidate parent genotypes, wherein each of the candidate parent genotypes represents a distinct parent; and comparing a sample genotype to the parentage genotype database, wherein a match between the sample genotype and one of the candidate parent genotypes or the genotype of each of the two individuals in a parent pair identifies the origin of the sample.

[0073] In a related but distinct embodiment, the invention provides a method of determining the origin of a fish sample by providing an origin genotype database encompassing a collection of candidate genotype profiles, wherein each of the candidate genotype profiles represents a distinct population of origin; and comparing a sample genotype to the candidate genotype profiles, wherein a match between the sample genotype and one of the candidate genotype profiles identifies the population of origin of the sample.

[0074] The terms “parentage genotype database” and “origin genotype database” as used herein, refer to a compilation of a collection of nucleotide sequences corresponding to candidate parent genotypes or candidate genotype profiles, respectively, in a centralized location that is capable of being searched with a sample gentoype to determine a match.

[0075] As used herein, the terms “candidate parent genotype” and “candidate origin genotype,” refer to the individual components of the collection that make up the “parentage genotype database” or “origin genotype database,” respectively. The concept of an origin versus a parent can be used to include the situation where the database includes individuals removed by more than one generation as well as to include other databases encompassing genotypes that do not correspond to parent components, for example, those comprised of biomaterials not capable of sexual reproduction. In addition, an origin genotype consist of a profile or panel that reflects a genetically unique set of markers corresponding to a specific population or batch rather than an individual parent as is desired in those embodiments where the method is practiced to identify, for example, a sample, for example, a fingerling, with regard to a distinct genetic combination of potential parents. The unique spectrum of genetic profiles created by a particular parent population or population of origin can thus be used to trace a sample to a specific producer.

[0076] As used herein, the term “origin” refers to the source that is identified by matching the genotype of a sample to a collection of candidate genotypes consisting of, for example, individual candidate parent genotypes or candidate genotype profiles/panels. As described herein, in certain embodiments of the invention it is desirable to identify the originating broodstock in a strict parentage test, while in other embodiments the invention methods can be utilized to match a candidate to a population of origin or batch of origin that is represented by a genotype profile or panel that collectively reflects a group of individual parents.

[0077] The parentage or origin genotype database encompasses a collection of candidate parent or origin genotypes, which can be established through genetic markers known in the art and described herein, for example, those represented by the SNPs and microsatellite sequences encompassed in the nucleic acid molecules provided by the invention. The genetic markers are sufficient to distinguish one of the candidate parent genotypes from other candidate parent genotypes in the database. The parentage genotype database can comprise genotypes of 2 or more, 3 or more, 5 or more, 10 or more, 20 or more, 50 or more, 100 or more, 200 or more, 500 or more, 1000 or more, 2000 or more, 5000 or more, or 10,000 or more, 15,000 or more, 30,00 or more, or 60,000 or more candidate parents. In addition, the number of genetic markers required to obtain the required statistical power to practice the methods of the invention depends on a variety of factors, including, the desired application of the method, the allele frequency of the marker, and the size of the collection encompassing the database. It is contemplated that at least 30 or more, at least 40 or more, at least 50 or more, at least 60 or more, at least 70 or more, at least 80 or more, at least 90 or more, at least 100 or more, at least 120 or more SNPs must be typed in methods for assigning a parent pair via the invention methods. In addition, it is estimated that at least 5 or more, at least 10 or more, at least 20 or more, at least 40 or more microsatellite markers can be typed in methods for assigning an individual to a parent pair via the invention methods. It is understood that the number of markers necessary can based on the particular parameters provided by the breeding and production organization, for example, different numbers of families in the production units.

[0078] In a preferred embodiment, the parentage genotype database is exhaustive, which means it can include all of the candidate parent or origin genotypes that potentially could represent the parental origin of a sample. For example, a parentage genotype database can include genotypes of substantially all of the parents from each hatchery that provides fingerlings. The number of candidate parent or origin genotypes in a parentage genotype database will depend on the needs of the user and will vary depending on the source of the sample to be identified, the availability of access to candidate parent or origin genotypes and the complexity of genetic markers expressed in the sample.

[0079] The parentage or origin genotype database can be directed to a candidate parent or origin genotypes of a single species or can contain representative genotypes corresponding to a variety of potential origin species, for example, cod and tilapia, as desired. Species specific markers may be used in order to verify or test whether a food sample or individual sample represents the species that the sample is sold or marketed as.

[0080] In one embodiment, the invention can be practiced to verify species origin. In this regard, the total result of genotyping of a sample with a high number of markers can be used to verify that the sample belongs to a species based on predetermined information regarding markers, which can be supplied, for example, by the producer. Although a proportion markers may correspond more than one species, differences in the number of alleles, allele sizes and allele frequencies can be used to distinguish between species.

[0081] Furthermore, if desired by the user, the candidate parent or origin genotypes can represent, for example, two populations such as farm raised salmon and wild salmon and the invention used to assign a sample to one of these candidate populations of origin rather than to a particular parent pair.

[0082] Thus, the invention provides a parentage or origin genotype database encompassing a collection of candidate parent or origin genotypes. The candidate parent or origin genotypes can be constructed by a variety of genotyping methods known those skilled in the art and described herein, for example, using genetic markers provided by the present invention.

[0083] It is contemplated that the parentage genotype database can encompass genotypes of existing broodstock and can be a complete collection of all broodstock genotypes. It is contemplated that the highest possible number of breeders from the hatcheries supplying samples is genotyped for inclusion in the parentage genotype database. In addition to genotyping broodstock and for optional inclusion into the parentage genotype database, it is further contemplated that genotyping can also be performed for a representative number of individuals from a farm when smelt are introduced or fish are harvested for slaughter. Thus, in the methods of the invention a parentage genotype database can be a partial or complete collection of candidate parent or origin genotypes corresponding to a desired population of potential parents. Once determined, the sample genotype can be compared to the parentage origin database.

[0084] It is understood that the methods provided by the invention enable the user to trace back not only to the individual genetic origin, for example, as defined by broodstock, breeding nucleus or hatchery, but also can be used to trace a sample back to any level desired throughout the food value chain by selecting the appropriate markers. This embodiment of the invention, which also can be described as optimized genetic logistics or genetic flow control, is predicated on the fact that a member of the production system, for example, a farmer receives distinct and identifiable batches of genetic material from the broodstock of origin or from the last multiplier providing seeds to the farmer such that the parents giving rise to the sample can be identified, typed and used to establish a genotype profile or panel. In particular, although a farmer may share genetic material with other farmers, each farmer receives a unique set of fingerlings originating from a distinct combination of parents that do not give rise to offspring in other farms—if the distribution from the hatcheries is organized optimally. Therefore, the provider of fingerlings, generally the hatchery, can collect and type DNA corresponding to different sets of parents that will give rise to specific batches of offspring targeting different farmers. In this embodiment of the invention methods, not only the brood stock profile as defined by its parentage genotype collection will be unique, but every farmed fish population or batch will be assigned a unique genetic origin genotype profile or panel that allows tracing the population of origin.

[0085] The methods of the invention for determining the origin of a fish sample by providing an origin genotype database encompassing a collection of candidate genotype profiles or panels further enable an individual producer or entity within the commercial chain, for example, a farmer, to collect tissue from a representative number of the fish traded, for example, to be traded at the wholesale level, and establish a “biobank,” which is another term for an origin genotype database that encompasses a collection of candidate genotype profiles. Once established, the biobank can be accessed to either verify the origin of a particular sample or exclude the corresponding producer as a potential source of the sample, for example, in situations of pathogen contamination, irregular or illegal acts.

[0086] Thus, as described herein, the invention methods allow for tracing a food sample back virtually to any level of the commercial chain by utilizing unique genetic markers and instant verification technology against a comprehensive or exhaustive database. The methods involve parentage or origin tests at different levels and can further be combined with other methods known in the art, for example, matching of genetic profiles based on gene frequencies, a method that relies on the statistical likelihood that an individual with a specific genetic makeup or genotype belongs to a specific population with a specific gene frequency at those loci. By comparison, the invention methods identify origin or parentage on the basis of direct matching of the offspring or sample genotype with a collection of genotypes that represent individual parentage or genotype profiles or panel reflecting a unique population of origin. A biobank further can encompass mitochondrial genetic markers that are useful in the methods for identifying parentage or origin based on their maternal inheritance pattern.

[0087] The determination of the genotypes corresponding to the sample as well as to the collection of candidate parent or origin genotypes that make up the origin database can be accomplished by a variety of genotyping methods known in the art and described herein and can utilize a variety of genetic markers, including, for example, the particular SNP and midrosatellite markers provided by the invention. Thus, a parentage genotype database, which can be constructed to contain a collection of candidate parent or origin genotypes can be accessed by a variety of means to compare a sample genotype and determine its origin/parentage. The determination of the sample genotype can be performed instantaneously, for example, using array or chip technology known in the art and the results can be advantageously transmitted via satellite or via a computer, allowing direct or remote linking to a central repository containing the origin genotype database by methods disclosed herein.

[0088] In a preferred embodiment of the invention method, the genotype determination of the candidate parent or origin genotypes that make up the parentage genotype database is performed via an accurate and fast high-throughput method, for example, a chip-based or gel-based method for detecting poymorphic markers, such as, for example, the SNPs or microsatellite sequences provided by the invention and designated SEQ ID NOS: [ ]. Because of the large number of individuals that will be genotyped for inclusion in the parentage genotype database, it is important that the genotyping system employed is appropriate for high-throughput conditions. In particular, genotyping methods that avoid multiple steps and do not require, for example, performance of PCR or electrophoresis are particularly useful for genotyping candidate origin or parent individuals. For example, the Invader™ detection platform, which involves direct hybridization of genomic DNA with differentially labelled SNP-containing probes allows sensitive and accurate detection of SNPs without sample amplification by PCR, as well as other technologies known in the art for fast and accurate high-throughput genotyping are useful in the methods of the invention.

[0089] The methods of the invention thus can employ a variety of genotyping methods available for characterization of genetic variation including, for example, techniques based arrays, solution-based, bead-based and gel-based systems, and MALDI-TOF mass spectrometry. Arrays, which involve binding of the sample molecules to a target on a substrate, can comprise a glass slide, or a semi-solid substrate, such as nitrocellulose membrane and the sample nucleotide sequence can be DNA, RNA, or any permutation thereof. One convenient method for determining the sample genotype involves use of a micoarray.

[0090] In contrast to the genotyping of the candidate parent genotypes that make up the parentage genotype database, different criteria are of importance in the selection of a genotyping method for the sample. As described herein, the methods of the invention can involve remote methods in which the step of determining the sample genotype is physically separated from the step of comparing the sample genotype to the parentage genotype database. For example, the sample genotyping can be performed by an individual with a low level expertise at a remote location, such as a warehouse, store, or anywhere along the commercial chain. Therefore, it is understood that the sample genotyping is approriately performed via a reliable, robust and relatively simple methodology, for example, a chip technology such as the Motorola eSensor™ DNA chip system. It is contemplated that capturing probes for the SNPs, for example, nucleic acid molecules of the invention as described herein, are placed at the surface of the chip and hybridized to a pool of PCR products representing the profiling nucleic acid molecules. Subsequently, a second hybridization can be performed using differentially labelled probes, for example, oligonucleotide probes provided by the present invention and described herein. Upon application of a slight voltage to the chip, electronic signals will communicate the particular SNPs detected in the sample and, thereby, the sample genotype.

[0091] As described herein, the methods of the invention can be used in direct methods performed at any point along the production line between hatchery and consumer. Therefore, the sample can be an egg as well as a filet sample corresponding to a findling or any other sample appropriate for gentoyping. The nucleic acid material to be genotyped can be extracted by any method desired by the user including, for example, automated extraction using a commercially available isolation robot. In a preferred embodiment, the methods of the invention can be used in remote methods in which the step of determining the sample genotype is physically separated from the step of comparing the sample genotype to the parentage genotype database. For example, the sample genotyping can be performed by a sales employee at a remote location, such as a warehouse, store, or anywhere along the commercial chain, and the comparison step performed instantaneously at a different location by conveniently interfacing the remote locations via a network such as the internet.

[0092] Once a sample genotype has been determined it is contemplated that origin determination can be performed instantenously. If desired, a parentage genotype database can be conveniently stored on a computer readable medium. Accordingly, the invention provides a computer readable medium encompassing an parentage genotype database, for example, an exhaustive collection of candidate parent or origin genotypes. Such a computer readable medium encompassing a parentage genotype database is useful for comparing the sample gentype with the candidate parent or origin genotypes, which can be conveniently performed on a computer apparatus. The use of a computer apparatus is convenient since a parentage genotype database can be conveniently stored and accessed for comparison to the genotype of a sample. A parentage genotype database can be conveniently accessed using appropriate hardware, software, and/or networking, for example, using hardware interfaced with networks, including the internet. ing various hardware, software and network combinations, the methods of the invention including the step of comparing the genotype of a sample to a parentage genotype database can be conveniently performed in a variety of configurations. Accordingly, the invention additionally provides a computer apparatus for carrying out computer executable steps corresponding to steps of invention methods. For example, a single computer apparatus can contain instructions for carrying out the computer executable step(s) of comparing the genotype determined for a sample to a parentage genotype database, and instructions for determining whether the sample genotype corresponds to one or more of the candidate parent or origin genotypes in the parentage genotype database.

[0093] Alternatively, the computer apparatus can contain instructions for carrying out the steps of an invention method while the parentage genotype database is stored on a separate medium. In addition, instructions for determining whether a sample genotype corresponds to candidate parent or origin genotypes in the parentage genotype database can be contained on a separate computer apparatus or separate medium, or combined with the computer apparatus containing the computer executable steps of the method and/or the database on a separate medium. Such a separate computer readable medium can be another computer apparatus, a storage medium such as a floppy disk, Zip disk or a server such as a file-server, which can be accessed by a carrier wave such as an electromagnetic carrier wave. Thus, a computer apparatus containing a parentage genotype database or a file-server on which the parentage genotype database is stored can be remotely accessed, for example, via a satellite or via a network such as the internet. One skilled in the art will know or can readily determine appropriate hardware, software or network interfaces that allow interconnection of an invention computer apparatus.

[0094] A parentage genotype database useful in the methods of the invention is interactive and capable of being updated with additional candidate parent or origin genotypes. It further is contemplated that the database includes the appropriate software providing statistical algorithms that can be implemented directly to compare the sample genotype to the collection of candidate parent gentoypes without having to resort to transferring data to a further location. Routines for the estimation of likelihood of origin of a sample are well known in the art and include, for example, Maximum Likelihood, Quasi-Maximum Likelihood and Generalized Method of Moments.

[0095] While the invention method is exemplified for fish species and fish/seafood products, those skilled in the art will appreciate that the methods provided by the invention are applicable to identify other species by genotyping samples and comparison of the sample genotypes with genotypes of potential parents. Thus, the invention method is applicable to plant and animal species that have a reproduction method similar to, for example, tilapia, salmon and other fish species, in particular, involving the mating of two parents in order to produce a set of offspring.

[0096] It is understood that modifications which do not substantially affect the activity of the various embodiments of this invention are also included within the definition of the invention provided herein. Accordingly, the following examples are intended to illustrate but not limit the present invention.

### EXAMPLE I

### Isolation of SNP Markers from Salmon and Tilapia

[0097] This example describes isolation of genomic DNA containing SNP markers from an Atlantic salmon (Salmo salar) individual and a Nile tilapia (Oreochromis niloticus) individual.

[0098] Two genomic libraries, one for tilapia and one for salmon were constructed using the following procedure. The genomic DNA was digested with restriction enzyme Sau 3A (Gibco BRL) followed by electrophoresis in a 1% TBE agarose gel. Using 1 Kb DNA size ladder (Amersham Pharmacia), DNA fragments of the size range 900-1100 bp were excised from the gel and isolated using QIAquick Gel extraction kit (Qiagen). The isolated DNA fragments were then ligated to Ready-to-Go pUC18 (Amersham Pharmacia), linearized with BamHI, BAP treated and formulated with T4 DNA ligase, followed by transformation into E. coli Pack Gold supercompetent cells (Stratagene). Cells from the libraries were grown on LA amp agar plates and clones were picked at random and cultured over night in LB medium. Plasmids were then isolated using QIAprep Spin Miniprep kit (Qiagen) followed by sequencing of the clone insert using standard M13 forward and reverse sequencing primers and Big Dye Terminator Sequencing kit (ABI).

[0099] Primers for PCR were designed from the insert sequences seeking to obtain as large amplicons as possible and with a minimum length of 400 bp using the Primer3 software (http://www-genome.wi.mit.edu/cgi-bin/primer/primer3www.cgi). Primers were ordered from and synthesized at MWG, Germany, and an additional M13 forward (5′-TGT AAA ACG ACG GCC AGT-3′) or reverse (5′-CAG GAA ACA GCT ATG ACC-3′) sequence was added to the 5′ end of each forward and reverse prime respectively in each PCR primer pair in order to simplify subsequent sequencing efforts.

[0100] Using the PCR primers described above amplicons were produced from six DNA samples: individually genomic DNA samples from five unrelated fishes as well as a sample of pooled DNA from 20 fish. The PCR reaction took place in a total volume of 20 μl, consisting of 100 ng DNA, 5 pmol of each primer, 2 μl dNTP (2 mM), 2 μl 10×PCR buffer (supplied by ABI optimized for the enzyme), 0.2 μl Ampli-taq polymerase (ABI). Temperature cycling was performed with an initial denaturation step of 95° C. for 3 minutes, then 12 cycles of 95° C. for 30 seconds each, 58° C. for 30 seconds and 72° C. for 30 seconds, then 25 cycles at 95° C. for 30 seconds each and 68° C. for 1 minute. Amplification was performed on a GeneAmp 9600 from ABI.

[0101] Subsequent to performance of the PCR, 3.6 μl PCR-product was mixed with 0.7 μl Exonuclease I (10 U/μl Amersham) and 0.7 μl Shrimp Alkaline Phosphatase (2 U/μl Amersham) and incubated at 37° C. for 15 min followed by 80° C. for 15 minutes.

[0102] The purified PCR segments were sequenced with the Big Dye Terminator-kit from ABI following the supplied recommended protocol, with standard M13 forward and reverse primers matching the respective sequences at the primer ends of the amplicon and analysed on an ABI 377 Automated Sequencer from ABI. The DNA sequences from the 5 individuals and the DNA pool were aligned using Sequencher™ 4.1 software (Gene Codes Corporation, USA) and SNPs were identified as irregular point variations.

### EXAMPLE 2

### Determination of SNP Variation in Tilapia and Salmon

[0103] This example describes the analysis of tilapia and salmon SNPs by oligonucleotide ligation assay (OLA). The three primers of a OLA analysis were designed as follows:
[0104] 1) Allele-specific oligonucleotide-1: 5′ABI_colour-(PRIMER SEQUENCE)-X-3′
[0105] 2) Allele-specific oligonucleotide-2: 5′ABI_colour-AAAAA-(PRIMER SEQUENCE)-Y-3′
[0106] 3) Joining-oligonucleotide: 5′-P-PRIMER-3′

[0107] The allele discriminating primer were selected from the upstream flanking sequence of the SNP, including the SNP point, and end labeled with a fluorescent dye compatible with the ABI 377 Automated Sequencer machine (tamra, fam or tet). Both allele specific oligonucleotide 1 (AS1) and AS2 were labeled with the same dye. The X and Y at the 3′ end of AS1 and AS2, respectively, indicate the nucleotide discriminating the SNP. The AS2 oligonucleotide has a five adenine nucleotide extension in order to allow discrimination of the OLA products and, thereby, the two genotypes. The joining oligonucleotide is labeled with a phosphate group in its 5′ end in order to make a subsequent ligation possible.

[0108] Amplicons containing the SNP were produced using the PCR primers designed at the initial, SNP isolation, step as described in Example 1 above, followed by an Exo-sap purification also as described in Example 1.

[0109] The OLA reactions took place in a total volume of 10 μl with the following reagents: 0.25 μl ligase (Pfu DNA ligase, Stratagene, 4 U/μl), 1 μl 10× ligase buffer (Stratagene), 2.5 μl PCR product (purified by exo-sap), 0.5 μl allele-specific oligonucleotide 1 (150 fmol/μl), 0.5 μl allele-specific oligonucleotide 2 (150 fmol/μl) and 0.5 μl joining oligonucleotide (150 fmol/μl) with the following temperature profile: an initial denaturation step of 94_C (10 seconds) then 25 cycles of 95_C (30 seconds) and 55_C (1 min) on a GeneAmp 9600 from ABI. Equal amount of OLA products and formamide gel loading buffer was mixed and loaded onto 6% SequaGel® (National Diagnostics) and ran on ABI 377 Automated Sequencer (ABI) and analysed using GenScan software (ABI).

### EXAMPLE 3

### Isolation of Microsatellite Markers from Atlantic Salmon, Tilapia, Cod, Atlantic Halibut, Seabass

[0110] This example describes isolation of genomic DNA containing microsatellite markers from an Atlantic salmon individual, a Nile tilapia individual, a Cod individual, an Atlantic halibut individual, a Seabass individual.

[0111] The procedure for isolation of microsatellite containing DNA was identical for each species. The procedure set forth below describes the isolation from one species.

[0112] A genomic library was constructed using the following procedure. Genomic DNA was digested with restriction enzyme Sau 3A (Gibco BRL) followed by electrophoresis in a 1% TBE agarose gel. Using 1 Kb DNA size ladder (Amersham Pharmacia), DNA fragments of the size range 900-1100 bp were excised from the gel and isolated using QIAquick Gel extraction kit (Qiagen). The isolated DNA fragments were then ligated to Ready-to-Go pUC18 (Amersham Pharmacia), linearized with BamHI, BAP treated and formulated with T4 DNA ligase, followed by transformation into E. coli Pack Gold supercompetent cells (Stratagene). Cells from the libraries were grown on LA amp agar plates in 37° C. for 12 hours. A colony replica of each plate were done using Colony/Plaque Screen NEF 990A filters (DuPont, Laborel) using the following procedure:

[0113] Each filter was uniquely marked with pencil and placed on top of the colony plate. The filters were subsequently stabbed with needle at three locations in order to optimize later orientation of autoradiograms/LA plates.

[0114] The filters were lifted from the colony plates and placed on 3 ml 0.5 M NaOH pools for denaturation of colony/DNA for 2 min before placed for 1 min on 3MM filter paper for short drying. The denaturation step was then repeated once before neutralization of filter on 3 ml 1 M Tris (pH 7.5) for 2 min, 1 min of short drying on 3MM filter before one repetition of neutralization step. Filters were air dried in 65° C. for 30 min. for fixation of DNA before washing in 2×SSC, 0.5% SDS, 50° C. Filters were pre hybridized in 120 ml 20×SSC, 24 ml 10% SDS, 24 ml Denhards, 6 ml tRNA 10 mg/ml, 306 ml H₂O for 30 min. in 50° C. before p³² (Amersham) end labeled probe was added and this hybridization step continued in 50° C. for 12 hours. The probe was a (GT)₁₀ oligonucleotide (synthesized at MWG, Germany). Filters were washed twice in 2×SSC, 0.5% SDS, 15 min. room temp. and twice in 0.5×SSC, 0.5% SDS, 50° C., briefly dried at 3MM filter paper, wrapped in plastic film before placing film (Hyperfilm™ MP, Amersham) on top of the filters and placed in −70° C. for about 5 hours. The film was developed using Curix60 developer machine (AGFA) following the supplied recommended protocol and colonies at the original plates containing GT microsatellites were identified. Colonies were picked and transferred to new LA amp agar plates from which over night cultures were produced in LB amp media. Plasmids were isolated using QIAprep Spin Miniprep kit (Qiagen) followed by sequencing of the clone insert using standard M13 forward and reverse sequencing primers, Big Dye Terminator Sequencing kit (ABI) following the supplied recommended protocol and detecting/analyzing the sequence on a 377 Automated Sequencer from ABI.

[0115] PCR primers flanking the(GT)ₙ repeat were designed using the Primer3 software (http://www-genome.wi.mit.edu/cgi-bin/primer/primer3 www.cgi ). Primers were ordered from and synthesized at MWG, Germany. One of the primers in each PCR set was labeled at its 5′ end by the primer synthesizing company with dyes that enables subsequent analysis using Automated sequencing machinery (ABI 377).

### EXAMPLE 4

### Determination of Microsatellite Variation in Atlantic Salmon, Tilapia, Cod, Atlantic Halibut, Seabass

[0116] This example describes the analysis of microsatellite variation in Atlantic, Nile tilapia, Cod, Atlantic halibut and Seabass by PCR followed by analysis on automated DNA sequencing/analyzing machine (ABI 377).

[0117] The procedure was identical for each species. The procedure set forth below describes such variation determination from one species.

[0118] Genomic DNA from 20 unrelated fishes was genotyped for a given microsatellite marker in order to detect the level of polymorphism as well as study how efficient (and the quality) each microsatellite marker was amplified by PCR. The PCR reaction took place in a total volume of 20 μl, consisting of 100 ng DNA, 5 pmol of each primer, 2 μl dNTP (2 mM), 2 μl 10 ×PCR buffer (supplied by ABI optimized for the enzyme), 0.2 μl Ampli-taq polymerase (ABI). Temperature cycling was performed with an initial denaturation step of 95° C. for 3 minutes, then 12 cycles of 95° C. for 30 seconds, 58° C. for 30 seconds and 72° C. for 30 seconds, then 25 cycles at 95° C. for 30 seconds each and 68° C. for 1 minute. Amplification was performed on a GeneAmp 9600 from ABI.

### EXAMPLE 5

### Parentage Testing of Fish

[0119] This example describes the usage of microsatellite markers for assignment of individuals to the correct parent pair. The procedure for such typing and assignment is identical for all species. Thus, for exemplification, the procedure given below describes such analysis for Atlantic salmon.

[0120] Genomic DNA from 6 female and 4 male breeders were genotyped for a total of 8 microsatellites (SEQ ID NOS:) according to the procedure set forth in Example 4. It was known which male that was crossed to which females. Furthermore, genomic DNA was isolated from a total of 13 offspring and these individuals were subsequently genotyped for the same set of markers as the group of potential parents. The genotyping results are presented in table 1.

TABLE 1
Genotypes of 13 Atlantic salmon offspring, 4 male parents
and 6 female partners for 8 microsatellite markers.

| Marker: | 104 | 104 | 106 | 106 | 109 | 109 | 115 | 115 | 125 | 125 | 131 | 131 | 135 | 135 | 173 | 173 |
|---|---|---|---|---|---|---|---|---|---|---|---|---|---|---|---|---|
| Offspring | | | | | | | | | | | | | | | | |
| B001F06 | 193 | 201 | 244 | 246 | 149 | 157 | 119 | 119 | 152 | 160 | 196 | 200 | 382 | 398 | 229 | 278 |
| B002A03 | 193 | 221 | 246 | 246 | 149 | 153 | 0 | 0 | 152 | 160 | 200 | 200 | 380 | 380 | 239 | 278 |
| B001F10 | 207 | 221 | 246 | 246 | 149 | 151 | 119 | 119 | 160 | 162 | 196 | 196 | 380 | 380 | 229 | 229 |
| B002C03 | 201 | 221 | 246 | 246 | 151 | 153 | 125 | 125 | 160 | 160 | 196 | 196 | 380 | 380 | 229 | 229 |
| B004B01 | 201 | 201 | 246 | 246 | 149 | 151 | 125 | 125 | 152 | 160 | 196 | 196 | 380 | 380 | 229 | 239 |
| B002E08 | 201 | 201 | 246 | 246 | 153 | 153 | 119 | 119 | 152 | 160 | 196 | 204 | 380 | 380 | 229 | 278 |
| B003C07 | 201 | 201 | 246 | 248 | 151 | 153 | 119 | 119 | 152 | 160 | 196 | 204 | 380 | 380 | 229 | 278 |
| B007B07 | 201 | 201 | 246 | 246 | 149 | 153 | 119 | 121 | 152 | 160 | 196 | 204 | 380 | 380 | 229 | 278 |
| B003H09 | 201 | 201 | 246 | 246 | 149 | 151 | 123 | 125 | 152 | 162 | 196 | 204 | 380 | 380 | 237 | 251 |
| B003B08 | 201 | 213 | 246 | 246 | 149 | 157 | 119 | 119 | 152 | 162 | 196 | 196 | 380 | 380 | 278 | 278 |
| B006B05 | 201 | 207 | 246 | 246 | 149 | 157 | 121 | 121 | 152 | 162 | 196 | 204 | 380 | 380 | 237 | 249 |
| B007G05 | 207 | 213 | 246 | 246 | 149 | 149 | 121 | 121 | 152 | 162 | 196 | 196 | 380 | 380 | 237 | 249 |
| B008C02 | 203 | 213 | 246 | 246 | 149 | 153 | 119 | 123 | 152 | 154 | 196 | 204 | 380 | 380 | 229 | 245 |
| Males | | | | | | | | | | | | | | | | |
| P01-E09 | 181 | 193 | 246 | 246 | 149 | 153 | 0 | 0 | 152 | 160 | 200 | 202 | 380 | 382 | 229 | 239 |
| P01-E10 | 201 | 207 | 246 | 246 | 149 | 153 | 119 | 125 | 160 | 162 | 196 | 196 | 380 | 380 | 229 | 239 |
| P01-E11 | 201 | 207 | 246 | 246 | 149 | 149 | 119 | 121 | 160 | 162 | 196 | 196 | 380 | 380 | 237 | 278 |
| P01-E12 | 189 | 203 | 246 | 246 | 149 | 153 | 123 | 125 | 152 | 162 | 200 | 204 | 380 | 380 | 237 | 245 |
| Females | | | | | | | | | | | | | | | | |
| P01-A07 | 201 | 221 | 244 | 246 | 149 | 157 | 119 | 119 | 152 | 162 | 196 | 200 | 380 | 398 | 237 | 278 |
| P02-A03 | 201 | 221 | 246 | 246 | 151 | 153 | 0 | 0 | 152 | 160 | 196 | 204 | 380 | 380 | 229 | 229 |
| P02-D10 | 201 | 221 | 246 | 248 | 151 | 153 | 125 | 125 | 152 | 152 | 204 | 204 | 380 | 380 | 237 | 278 |
| P02-A05 | 173 | 201 | 246 | 246 | 151 | 153 | 121 | 125 | 152 | 152 | 204 | 204 | 380 | 398 | 251 | 278 |
| P01-B06 | 201 | 213 | 246 | 246 | 153 | 155 | 121 | 125 | 154 | 160 | 196 | 196 | 380 | 380 | 229 | 278 |
| P02-E08 | 201 | 213 | 246 | 246 | 149 | 157 | 0 | 0 | 152 | 152 | 196 | 204 | 380 | 380 | 249 | 278 |

[0121] A comparison analysis was performed between the genotypes of the offspring and the potential parent pairs and the correct parent pair was identified based on their ability to produce an offspring with the same genotype as found in a particular offspring. The result of such parent pair assignment of the offspring genotyped is presented in table 2.

TABLE 2
Assignment of offspring to parent pair

| ID | SIRE | DAM |
|---|---|---|
| B001F06 | P01-E09 | P01-A07 |
| B002A03 | P01-E09 | P01-A07 |
| B001F10 | P01-E10 | P02-A03 |
| B002C03 | P01-E10 | P02-A03 |
| B004B01 | P01-E10 | P02-A03 |
| B002E08 | P01-E10 | P02-D10 |
| B003C07 | P01-E10 | P02-D10 |
| B007B07 | P01-E10 | P02-D10 |
| B001C12 | P01-E11 | P02-A05 |
| B003H09 | P01-E11 | P02-A05 |
| B004D04 | P01-E11 | P02-A05 |
| B003B08 | P01-E11 | P02-E08 |
| B006B05 | P01-E11 | P02-E08 |
| B007G05 | P01-E11 | P02-E08 |
| B008C02 | P01-E12 | P01-B06 |

[0122] This example demonstrates an assignment analysis of a small number of offspring/families. The same procedure is used for identify the correct parent pair in a situation where any number of offspring/samples are to be assigned to correct parent pair identified from any size of potential male and female parent individual group available.

[0123] This example is shown for microsatellite markers. Identical tests can be performed by using other genetic markers as for example SNPs.

[0124] Throughout this application various publications have been referenced within parentheses. The disclosures of these publications in their entireties are hereby incorporated by reference in this application in order to more fully describe the state of the art to which this invention pertains.

[0125] Although the invention has been described with reference to the disclosed embodiments, those skilled in the art will readily appreciate that the specific experiments detailed are only illustrative of the invention. It should be understood that various modifications can be made without departing from the spirit of the invention. Accordingly, the invention is limited only by the following claims.

The application's sequence listing, which the Patent Office published only in electronic form, follows.

SEQUENCE LISTING (1377 sequences)

SEQ ID NO: 1 - DNA, 219 bp, Salmo salar
  misc_feature 66: n = A,T,C or G
aaccaaaagcacagagacccaaataatggtgaattacatacactcagaatcaacaaaagcacagtnccacagcaagcagctgacattaattgaggagtccataaacacaaacaacttctggcwtaaattggaaaaaacaaaaaaatggtgacatatggacaacccattttaaaacactctacaacaccattcaaattgatgcaaacacagaacaattgt

SEQ ID NO: 2 - DNA, 22 bp, Salmo salar
taaacacaaacaacttctggca

SEQ ID NO: 3 - DNA, 28 bp, Salmo salar
aaaaaataaacacaaacaacttctggct

SEQ ID NO: 4 - DNA, 24 bp, Salmo salar
aaattggaaaaaacaaaaaaatgg

SEQ ID NO: 5 - DNA, 291 bp, Salmo salar
ggatggagttttggtgacatcaccaggcaataaattagttaataaaccaataagaaagagagttcctaaacctctctgccaatacaagcaagttttcagtttcccctccccacttccagacactcccagactgtcctagcaaaatgtatctttcctaagaagcttttttagtttatttttgacaatttcaattgaaawcaatcacattaatgtacttcattaatacccagaaactatatgatattgagataaaaacgcctgcattggacatttaaagaaagcataacagaa

SEQ ID NO: 6 - DNA, 24 bp, Salmo salar
atttttgacaatttcaattgaaaa

SEQ ID NO: 7 - DNA, 29 bp, Salmo salar
aaaaaatttttgacaatttcaattgaaat

SEQ ID NO: 8 - DNA, 24 bp, Salmo salar
caatcacattaatgtacttcatta

SEQ ID NO: 9 - DNA, 266 bp, Salmo salar
gtgctgagtgattagtgctttttgaggtcagttcggtttcggttttataataaaaaaaataataatgttttttcaatttcggattcaatactaattttttttacattaaatgcactatgcattacgtgggttgaatgctgtaacaacacygaataaaacaatgaatccaatcccaygatggtagagactgcccattactgcttattaaccataatttattcacatgactaattctgttgttgtgtatattacatttgatttatttg

SEQ ID NO: 10 - DNA, 19 bp, Salmo salar
acaatgaatccaatcccac

SEQ ID NO: 11 - DNA, 24 bp, Salmo salar
aaaaaacaatgaatccaatcccat

SEQ ID NO: 12 - DNA, 19 bp, Salmo salar
gatggtagagactgcccat

SEQ ID NO: 13 - DNA, 289 bp, Salmo salar
caggaagagagttgaagatagttattaggaagtgcagtcattctctttggttccttggtccttgacacacacattgtgcattggttccctataacatacggagacacagacccagaaatggcttctcatctctcmctctccatcctcctactcatcttcagactctcaggtaagggtaacatgtttctatgaagtgctgaagttgaggtcagggactgggacaaatgttggaactctgaagacagaagcagcagcagtttgtcttatcaataacacttcctgtattatg

SEQ ID NO: 14 - DNA, 20 bp, Salmo salar
aaatggcttctcatctctcc

SEQ ID NO: 15 - DNA, 25 bp, Salmo salar
aaaaaaaatggcttctcatctctca

SEQ ID NO: 16 - DNA, 21 bp, Salmo salar
ctctccatcctcctactcatc

SEQ ID NO: 17 - DNA, 220 bp, Salmo salar
ccactcgtttccttcccgtatccaaaccacatggtcggcgttccgaaggtccaactaggagaacatgaccgccccctggagaggctcggaagccgaggagatgakatgtagcaggtaatatttttttaacagtaatgtcattaaaacccaggtagttgatacatggatgcagggtcttgtccttcttctccacaaagaagaaccctgcgctggcggggga

SEQ ID NO: 18 - DNA, 18 bp, Salmo salar
ggaagccgaggagatgat

SEQ ID NO: 19 - DNA, 24 bp, Salmo salar
aaaaaaggaagccgaggagatgag

SEQ ID NO: 20 - DNA, 24 bp, Salmo salar
atgtagcaggtaatatttttttaa

SEQ ID NO: 21 - DNA, 294 bp, Salmo salar
aacatgacatcacaatacacatacacacactcacatgcagacacacacacacgcaaatacatacacacactttgatgtattgccttttatgttgcagtgacagggttggcactgggcctagagcagagtgtagtttatgatggtgggtataataggaccagttaaaaataactttattttcaaatacacactcaaacagacagaggtgacrtaatgagaggacggaaggagaagacgtaaggagagaacggagaaagagagtagagagacagaaagaaggggagagacagtgaa

SEQ ID NO: 22 - DNA, 24 bp, Salmo salar
acactcaaacagacagaggtgaca

SEQ ID NO: 23 - DNA, 28 bp, Salmo salar
aaaaacactcaaacagacagaggtgacg

SEQ ID NO: 24 - DNA, 23 bp, Salmo salar
taatgagaggacggaaggagaag

SEQ ID NO: 25 - DNA, 213 bp, Salmo salar
ccaacacaaagaaatacacaacctagaaaatcatagagatacaaaaccagaacaatgcccaaaaacccyggaacacataaaacaaacacccctcttacataagaacatatcccaacaaaccccaaaccacataaaacaaacaccccctgccacgtcctgaccaaactacaataacaaataacccctttactggtcaggacgtgacagctaaac

SEQ ID NO: 26 - DNA, 20 bp, Salmo salar
gaacaatgcccaaaaacccc

SEQ ID NO: 27 - DNA, 25 bp, Salmo salar
aaaaagaacaatgcccaaaaaccct

SEQ ID NO: 28 - DNA, 23 bp, Salmo salar
ggaacacataaaacaaacacccc

SEQ ID NO: 29 - DNA, 313 bp, Salmo salar
ggacctgaagaactgtaatatcctatgtttctcagagtcgtggctgaacaaggacatggataatactgtatatgtacatctarctgttttttctatacattatcaagactgaacggcagcttcaggtaaagtaaaggggggaggtgtatgtatgtctctttgttagcaacagctggcacgcaatctctaatattaaggaaatctcaaggttttgctcacctgagctagaatactcaatgataaactgcagacaatactatttaccgagagagttttcttatattgttttccatagctctctatttaccaccac

SEQ ID NO: 30 - DNA, 25 bp, Salmo salar
gataatactgtatatgtacatctag

SEQ ID NO: 31 - DNA, 29 bp, Salmo salar
aaaagataatactgtatatgtacatctaa

SEQ ID NO: 32 - DNA, 22 bp, Salmo salar
ctgttttttctatacattatca

SEQ ID NO: 33 - DNA, 360 bp, Salmo salar
ttttttctatacattatcaagactgaacggcagcttcaggtaaagtaaaggggggaggtgtatgtatgtctctttgttagcaacagctggcacgcaatctctaatattaaggaaatctcaaggttttgctcacctgagctagaatactcaatgataaactgcagacaatactatttaccgagagagttttcttatattgttttccatagctctctatttaccaccacaaaccgatgctggcgctaagaccacactcaacgagctgtatagagccataagmaaacaagaaaagccacatccagaggcagcgctactagtggggaaactgaaatctgtcttacctcatttttaccagaatgt

SEQ ID NO: 34 - DNA, 22 bp, Salmo salar
cgagctgtatagagccataagc

SEQ ID NO: 35 - DNA, 27 bp, Salmo salar
aaaaacgagctgtatagagccataaga

SEQ ID NO: 36 - DNA, 20 bp, Salmo salar
aaacaagaaaagccacatcc

SEQ ID NO: 37 - DNA, 212 bp, Salmo salar
aagcatttgtccatttatacatgtttcattccagactagaagtgtgtgcagaaaggaggccatctagtggtgaaaatggcatctaccaaaaycacacgcgaccaaaatctctgtcctgctacttagtagacatgaagctagggtttgggttgtgtttgaggctaggttcaaccctaaccctagcctcaaccagaaccctaactcttgcctta

SEQ ID NO: 38 - DNA, 22 bp, Salmo salar
tgaaaatggcatctaccaaaac

SEQ ID NO: 39 - DNA, 26 bp, Salmo salar
aaaatgaaaatggcatctaccaaaat

SEQ ID NO: 40 - DNA, 20 bp, Salmo salar
cacacgcgaccaaaatctct

SEQ ID NO: 41 - DNA, 330 bp, Salmo salar
cacagaatctgattaccctgtggctttagctacgtgtgggatttgtagaaattaatagtgcagctagggcccttctgttctgctgcagattccacaatatagcctggttaacgcygcagcgtttaatctggtttaaccagggtatccagaaaaaacagacaacacatcaagctctgactgactaataacatgaccaagagtatccatccattactctacagctgtgcagaaggtctgataaaaatgaaaccagcagttctaatctacaatattgcatagatgacaggaattggctcagtggaattttgcacctctgataagaccgcttcc

SEQ ID NO: 42 - DNA, 21 bp, Salmo salar
caatatagcctggttaacgcc

SEQ ID NO: 43 - DNA, 27 bp, Salmo salar
aaaaaacaatatagcctggttaacgct

SEQ ID NO: 44 - DNA, 22 bp, Salmo salar
gcagcgtttaatctggtttaac

SEQ ID NO: 45 - DNA, 161 bp, Salmo salar
tcctccgagcccattggacgggagcctcggcctctccgtgccgccccraaatccaaccccaccccccaccttcgccgaggcgcgcttggtgtcttttgttagggccgacactttacgcgcaataatagtcaccggccgaattctagcctgctatgacaaac

SEQ ID NO: 46 - DNA, 17 bp, Salmo salar
ctctccgtgccgcccca

SEQ ID NO: 47 - DNA, 21 bp, Salmo salar
aaaactctccgtgccgccccg

SEQ ID NO: 48 - DNA, 19 bp, Salmo salar
aaatccaaccccacccccc

SEQ ID NO: 49 - DNA, 319 bp, Salmo salar
  misc_feature 152: n = A,T,C or G
tgtacagtataaagcaagggtgcaactttgtttttcgaagtgggggggacataactattattataatttttttcccccagttggataaacactccaaacakcctacccgactgcttggaggtgtccgcatggtcctaaagcaccccgtagcntcgttttgtatcacattccaatgataaaactaagggggacaaaaatgtaatttcagaatttggggggagacatgtactcatctggtttaaagaatcaatgtcttttggggtcttttgcattttattatattttatatacaagtctacatcttattatttattttttt

SEQ ID NO: 50 - DNA, 19 bp, Salmo salar
ggataaacactccaaacag

SEQ ID NO: 51 - DNA, 24 bp, Salmo salar
aaaaaggataaacactccaaacat

SEQ ID NO: 52 - DNA, 19 bp, Salmo salar
cctacccgactgcttggag

SEQ ID NO: 53 - DNA, 280 bp, Salmo salar
gtgacatcggcggatttggtggattaagaggcatccaatgcaagctgatatctctatcttaaattgacagatttttattgggattttttwattatgctaattagattcccgcggggcacggacattgactctaggggatttaaactgtgtagtactacggctctattcaatctgtatcaatgaagcattaacattgaagtgttgacacaccagggaatattgcccctaattagtacaaggaagctatgtagaaatacagacggtctaaagggcccttccc

SEQ ID NO: 54 - DNA, 23 bp, Salmo salar
cagatttttattgggatttttta

SEQ ID NO: 55 - DNA, 28 bp, Salmo salar
aaaaacagatttttattgggattttttt

SEQ ID NO: 56 - DNA, 22 bp, Salmo salar
attatgctaattagattcccgc

SEQ ID NO: 57 - DNA, 368 bp, Salmo salar
attatgctaattagattcccgcggggcacggacattgactctaggggatttaaactgtgtagtactacggctctattcaatctgtatcaatgaagcattaacattgaagtgttgacacaccagggaatattgcccctaattagtacaaggaagctatgtagaaatacagacggtctaaagggcccttccctctttgttcccttcatctgtactggtcttaaaacaaaggctatggtaaaacaatcaatcatttatctgtgcttttactcrtccagtttgatgccaatgcagttggaggaaaggagatgaggagaggaaaagccactttacactattgagatacacccagatgagtcatctctaccatt

SEQ ID NO: 58 - DNA, 24 bp, Salmo salar
atcatttatctgtgcttttactcg

SEQ ID NO: 59 - DNA, 28 bp, Salmo salar
aaaaatcatttatctgtgcttttactca

SEQ ID NO: 60 - DNA, 21 bp, Salmo salar
tccagtttgatgccaatgcag

SEQ ID NO: 61 - DNA, 191 bp, Salmo salar
gagtcacaatgtatacacataatattatagtgactattcagtttacaattgatatttaaagatagaatccttagttgctgtatccatttttggrcttgaatgataaagacccattttgtttcttgaagaatataatttataaatgcctaatgagcttagttcaactattacaaaacttgtttcaattagga

SEQ ID NO: 62 - DNA, 24 bp, Salmo salar
ttagttgctgtatccatttttggg

SEQ ID NO: 63 - DNA, 28 bp, Salmo salar
aaaattagttgctgtatccatttttgga

SEQ ID NO: 64 - DNA, 24 bp, Salmo salar
cttgaatgataaagacccattttg

SEQ ID NO: 65 - DNA, 155 bp, Salmo salar
ttgaacaccaaaacagagtgtcaagagaatatggaaacacatggaaaccatataagaacagasattattattatattaattatataacaaatataatctatagttaatatcttttgtagaacacgttacattgaactaatgaaatattacactga

SEQ ID NO: 66 - DNA, 25 bp, Salmo salar
acatggaaaccatataagaacagac

SEQ ID NO: 67 - DNA, 28 bp, Salmo salar
aaaacatggaaaccatataagaacagag

SEQ ID NO: 68 - DNA, 30 bp, Salmo salar
attattattatattaattatataacaaata

SEQ ID NO: 69 - DNA, 209 bp, Salmo salar
aactggtgatggagcaaaggagagagagaagaaagaagagtttaaggcaggaaaaggcacttttggcatcattgggattcaatctggaaatcctgttccaacgatgsaacagacatatgaagattcactctaaagttcctcagagtaaaaatacaccacagaaatacaccacaagtggaaaagtccacttggtgacatcacaggctcta

SEQ ID NO: 70 - DNA, 22 bp, Salmo salar
ggaaatcctgttccaacgatgc

SEQ ID NO: 71 - DNA, 29 bp, Salmo salar
aaaaaaaggaaatcctgttccaacgatgg

SEQ ID NO: 72 - DNA, 25 bp, Salmo salar
aacagacatatgaagattcactcta

SEQ ID NO: 73 - DNA, 213 bp, Salmo salar
aaaactccctagaaaggacaaaaacctaggaagaaacctagagaggaaccaggctatgaggggtggccagtcctcttctggctgtgcagggtggatattataacagaacayggtcaagatgttaaaatgttaaaatgttcataaatgaccagcatggtcaaataataataatcatagtagttgtcgagggtgcaacaagcacgtccggtgaac

SEQ ID NO: 74 - DNA, 25 bp, Salmo salar
cagggtggatattataacagaacac

SEQ ID NO: 75 - DNA, 30 bp, Salmo salar
aaaaacagggtggatattataacagaacat

SEQ ID NO: 76 - DNA, 27 bp, Salmo salar
ggtcaagatgttaaaatgttaaaatgt

SEQ ID NO: 77 - DNA, 188 bp, Salmo salar
ttatggactattagggttagaccagggacaggggtggtgggttagttagtggctagttaacagtgatagttagttgaacatcataaacctcctgtagtggtttawacaaatatagtattaccacattattctgtcactamtacaaacattgaagggttaaaggatgtgttcatgctggtaaagaatga

SEQ ID NO: 78 - DNA, 20 bp, Salmo salar
aacctcctgtagtggtttaa

SEQ ID NO: 79 - DNA, 27 bp, Salmo salar
aaaaaaaaacctcctgtagtggtttat

SEQ ID NO: 80 - DNA, 27 bp, Salmo salar
acaaatatagtattaccacattattct

SEQ ID NO: 81 - DNA, 230 bp, Salmo salar
acaaaaaaagaaagtggcacagcaattcattttttgttctgaaaacaaaatgttacggttggggcaaatccaatacattactcagtaccactctccgtattttcaagcacaatggtggcygcatcatgttatgggttaacttgtaatcattaaggactggggagtttttccaggacaaaaaaagatacggaatggagctaagcacaggtaaaatcctagaagaaaaccta

SEQ ID NO: 82 - DNA, 23 bp, Salmo salar
tattttcaagcacaatggtggcc

SEQ ID NO: 83 - DNA, 29 bp, Salmo salar
aaaaaatattttcaagcacaatggtggct

SEQ ID NO: 84 - DNA, 23 bp, Salmo salar
gcatcatgttatgggttaacttg

SEQ ID NO: 85 - DNA, 220 bp, Salmo salar
ggaaggagttctggaatgagctggtctgctgaagcggtgcccccagttgtataaagtgagctgaagaactggccatagaggggccagagtgaagaataatrttcctcagcctttggaacacccattgggcaacagctggccatggtgtctagttaccccctcacactcaacaggctagtggtatcagctatgcacagacagatgttcttgtcaaagtcag

SEQ ID NO: 86 - DNA, 25 bp, Salmo salar
agaggggccagagtgaagaataata

SEQ ID NO: 87 - DNA, 30 bp, Salmo salar
aaaaaagaggggccagagtgaagaataatg

SEQ ID NO: 88 - DNA, 23 bp, Salmo salar
ttcctcagcctttggaacaccca

SEQ ID NO: 89 - DNA, 400 bp, Salmo salar
tcagtctcctgaggaggaataggttttgtcgtgctctcttcacgactgtattggtgtgcttggcccatgttaatttgtttttaattattattatttctttacccctttttctccccaatttcatggtatccaattggtwgtagttactgtcttgtctcatcactgcaactcccgtacggactcgggagaggcgaaggtcgagagccatgcgtcctccgaaacacaacccaaccaagccacactgctttttgacacaacacacatccaacccggaagccagccgcaccaatgtgtcggaggaaacaccgtacacctagcgacctggtcagcgtgcactgtgcccggcccgccacaggagtcactagcgcgcgatgagacaaggaaatccctgccggccaaa

SEQ ID NO: 90 - DNA, 21 bp, Salmo salar
tttcatggtatccaattggta

SEQ ID NO: 91 - DNA, 26 bp, Salmo salar
aaaaatttcatggtatccaattggtt

SEQ ID NO: 92 - DNA, 23 bp, Salmo salar
gtagttactgtcttgtctcatca

SEQ ID NO: 93 - DNA, 360 bp, Salmo salar
cagcacaccaacacatcacatcagttatgtgccatctacctcacgttgtttctctcccccattgcaaaattaaaatgaggcacgctgtcaatatcacaacaaggtgagcgtggaataaaccagcctcatttaaaacccagctctgagcataccgctgtcatcaataccagttgtgatgagggtagctcataaaatccagacattgttactgatagcctttagattgtctgagccttcagtctttatagyacccagctgtcttctccggtctgtcactcctcagctgaaaatgtcttcatcttagtgacaggtgactccctcccacacttttgacctgacccacattcctccacggtgctc

SEQ ID NO: 94 - DNA, 22 bp, Salmo salar
ctgagccttcagtctttatagc

SEQ ID NO: 95 - DNA, 28 bp, Salmo salar
aaaaaactgagccttcagtctttatagt

SEQ ID NO: 96 - DNA, 21 bp, Salmo salar
acccagctgtcttctccggtc

SEQ ID NO: 97 - DNA, 400 bp, Salmo salar
gaattttttgttttgatatcattgtgtatgatgttgtttttgggcagttgtgttacttgttcgttttgctaaaagtaatgccggcattgttgggtctggttttagcatmatgtggtggacttccctttgactttcattccaaatacctcaggacttcatctgcataatcccactcctctagcggaaggacagccagtcaattccttcgctccaccttttcctttccagtgtaagtacagtagcctacgcaaaataaccttggagatgttttccttatgaggtagctccagatgtagggaccttagaatcacatgtagccggcctacattagcctagataccatgtgttctataatgtcaacaatattaggcagacccttctaattacttacgtaattctc

SEQ ID NO: 98 - DNA, 22 bp, Salmo salar
tgttgggtctggttttagcatc

SEQ ID NO: 99 - DNA, 28 bp, Salmo salar
aaaaaatgttgggtctggttttagcata

SEQ ID NO: 100 - DNA, 21 bp, Salmo salar
atgtggtggacttccctttga

SEQ ID NO: 101 - DNA, 264 bp, Salmo salar
aagtttgaattgattcttggtacttagagctgggaaccactggatgtaactctaagactacaagtgaatggttttagcttccctctgaatcaacctcggcagtgttgcttggcatcacactttttagctcaacacaacaacacctgattcaaatgaactaataactmatcttaattttagcccacaattggtttcatcaggtgtgctgctgtggggctggagaaaagtgtgacatcaacacggctcttgaggactgcagctgca

SEQ ID NO: 102 - DNA, 25 bp, Salmo salar
cctgattcaaatgaactaataactc

SEQ ID NO: 103 - DNA, 27 bp, Salmo salar
aaaaagattcaaatgaactaataacta

SEQ ID NO: 104 - DNA, 22 bp, Salmo salar
atcttaattttagcccacaatt

SEQ ID NO: 105 - DNA, 565 bp, Salmo salar
ctttgtcttgatgaacggttgaaatgtagccccaacagccctcaaactcaactctgcatgttttcattgttcccctctagtcagtgactgatttaaacctgtgacaccaggtgtgtgcaattcattaccaggtagaagagaaaaccagcaggctccaaacctctagggtaagagttgagtatccttgcccaacaggtttgccttcatgtaacttgtaatatacatgtaactcaagtatacaaggtctgtgttgttatggttttataaactagtgtaagggtttaaaaaaaatactgtcctatgttgaccataacctactactcaaatgcatcatgaatttgcatgctccaaaagagactcatctgtgctagattaaaagtggctaaatcagttgtgatgtaaatcatgtgcatagtcacacgtggtttatgtttctgggtgactgggtggaacattactttgccataaggaacgtgctgcattattaaggcatgcctcaaataaaacaggggttcttggaattaatcgaatacgtttaggcaaacagttacagcacataatagtc

SEQ ID NO: 106 - DNA, 482 bp, Salmo salar
tgagagcatagtaattctgaagtaattctgaaaaaaatctgaaaaaaattatgcttttatttttcttcacaaaaatagtgcactgggctttttaatagtcctgtattagcagcaacattagtccagcattttatgtcacttcgaggaatacaacactgagtcttgcatgaatcccctgttgttctggaagactgtgtgatcttgctccccttggccagatgtaatagcaggacgcgttctcaaagcatgcgcacagcagctggcaggtgtcttcacagacattttcaatctctccttgtcgttgtctgtaatcccaaaatgtttcaagctgaccaccattgtccctgttcccaagaactcaaagataacctgcctaaatgactatcgtcctgtagcagccacatctgtaattatgaagtgctttgaaaggctgaacatgacacacatcaacaccatcatcccaatacgcatactgccccaaa

SEQ ID NO: 107 - DNA, 552 bp, Salmo salar
tgagggttgcccctctctcttactctctctctctccctgtcctccgccctgacgaatctccccatacaaaaccatctgtgtcatttcattaaccgcacttccctcgttctctctctctctctccctccttccctctctccccctggccggggttcaccatgttagtgtgtccgtattcatggagccgtcccctcctgcatagcgtaatgaagtcaggacctctcagcaccactgtaattccagcgactagtttgtgcaacgcaacaatttatcacttgtcacgaagacacttagtgttgtactgcttaacaaggacatcctgtgagcctgggctactagcagggagccgtttgcatatttactaaatgcggagtgtcattgccaccacggcctgttgcctgcatgaattatttctctatctgcaataaacagatgggtaattattactgccataatcagataaattctctctgtaatgttctaacgtggcaaaatcttttaactcattgcaggctgagggatatttatagactcagaatggtgaggctgaag

SEQ ID NO: 108 - DNA, 437 bp, Salmo salar
tctctgtactttgctcagttcatctttccctcaatcctgactagtctcccagtccctgccgctgaaaaacatccaaacagcatgatgatgcctccaccatgcttcaccgtagggatggtattggcgatgagaggtgccagctttcttccagacatgacgcttggcattcaggccagagttcaatcttggtttcatcagaccagagaatcttgcttctcatggtctgagtgtcctttaggtaccttttggcaaacaccaagcaagttgtcatgtgccttgcatgtgtcatgtgccgaattcactgcacttccattcagtttttcaacttgtactgggggactttcagaccttcttgtgaggcctgtgggcatcagagcaaaacgtgtacataagagtctcacctttccacagaggggtcatattaggttgtaactcaa

SEQ ID NO: 109 - DNA, 639 bp, Salmo salar
tagcatgagttccagtctgtttgtgctattatgacaactcccagtcagcagcgatggaatagacacgcgcacaaacagatatgtgacaaggctactgtctgtatacatggcctatttttcattgtttgttgagaacctgtcctataccgtacagttaaagtcatcattaccatgttttgctgtaatggaggttctcagtgatacatatagacaatgccctttattatctagtataaacagtagctttccattccactgtcccactttgattgcaatataagtgctttgaattaattgatacccaacatgttcacacgttacatacactagtggttctggggggggggggacagtgcccctgtgacaacaattttggaaccccttgtggcccccctaaatgtggagaatgaactaatttttacataactaatttttgctatcgttctttttttacatccgttattagacagtggcgacgatgatgattatgagcatggtcttttgcctgctaatgcctgcaatgcagtgaagaaaacgatatgacaacaataacgtctaatgtaactggcccctctaacagtgcaactggccccagcttggccaccccagttgaaatggtctagaaccgccactagttac

SEQ ID NO: 110 - DNA, 934 bp, Salmo salar
  misc_feature 42, 101, 219, 220, 222, 251, 400: n = A,T,C or G
ttttacagtggatatagatacttttgtacctgtttcctccancatcttcacaaggtcttttgctgttgttctgggattgatttgcacttttcacaccaaantacgttcatctattggagacaaaacacgtctccttcctgagcggtatgaaagctgcgtggtcccatggtgtttatacttgcatactattatttgtacagatgaacgtggtaccttcanntntttggaaattgctcctaaggatgaaccanacttgtggaggtctacaattttttttctgaggtcttggctgatttcttttgattttcccatgatgtcaaacaaagaggcactgagattgaaggtaggccttgaaacacatacacagactcaaatgatgtcaatwagccymtcagaagcnttctaaaasccatgacatmwyattttgtgcattttccaasctgtttwwargsrcagtcaacttagtggtatgtaatcttctgacccaatggaattgtgatacagkgaattataagtgaaataatctctctgtattaattgttggaaaaatgacttgtgtcatgcacaaagtagatgtcctaaccgtcttgccaaaactatagtttgttaacaagaaatttgtggagtggttgaaaaacgagttttaatgactccaacctaagtgtatgtaaacttccgacttcaactgtacatgtcatttcaggtcaataaccacagtcacgtgttaggtccaaggtgtcataatatgcgactgtggtcgtttgttcctgctgtatctaagagactttggactgacccaataacaacagtgaagttagtttgacattgttttccccgttgtatgaaaccctgcaccgcagccccctactaaaagcctgcagttccctctttccctccttttatgagatgtacagtatgtcctgtaacctctggt

SEQ ID NO: 111 - DNA, 558 bp, Salmo salar
ttctttagccatctcagtgatttggtttcacaaggctctctgggactttgttgttttggttgttacttctgtaaaagttgttagcctaaagctgttatcaaaaactattatactgaacacaaatataaacgcaacatgcaacaattttaaagattttgttgagttacagttcatataaggaaatcagtcaatctaaataaataaattgggccctaatctatggatttcacatgaatgggcatgggccaggccatgggtaggcctgggagggcataggacaacccactggggagctaggcccagccaatcagaattagtttcccctacaaaagggtttattacagacataaatactcctgtatacatctgtattcatttctagctgaagggacttaagaggggacctggggacttatgacatagcgtttggcagtggttccaggtctggtgacacgagcagtattggactgtgatgaatgacatgtatctaaatatagtgaggagccccacttcacccgggactccagttcacagacagaaacacacagcccaggccaa

SEQ ID NO: 112 - DNA, 427 bp, Salmo salar
cgcatctacttgcgacccttatgctgtaaacacagtccagttcagtctgtcaatgcaattgaatcctaccccaatgcgctctgcctacaagaaaatatcttgcatagtttgttttgttttggtatgttgcattgaaagtggctaatattgcattgattcgatcacaattcacacagtagagggaaatgttgatagtattaactaaagcggaaaactagaaagttgtgtgaagttcagtccagggagagctgcttagagagaatattggttacagatggttagaggtagcctgagaatcttccagaacatgtaattcctgtagtctacccctcttctctttttaccttttgtctttgtaaaactcaggttatctggagtcattatacagtgccctgctgaaaaatacctcaaagcggtggcatttgtg

SEQ ID NO: 113 - DNA, 36 bp, Salmo salar
tgtaaaacgacggccagtccccaggaatgttctcac

SEQ ID NO: 114 - DNA, 39 bp, Salmo salar
caggaaacagctatgacctttcccctcaagcataatcta

SEQ ID NO: 115 - DNA, 34 bp, Salmo salar
tgtaaaacgacggccagtcgtcgggctcgtcaga

SEQ ID NO: 116 - DNA, 38 bp, Salmo salar
caggaaacagctatgaccattttcaggtcttgccgtag

SEQ ID NO: 117 - DNA, 38 bp, Salmo salar
tgtaaaacgacggccagttaggtggggtgtaaaagtcc

SEQ ID NO: 118 - DNA, 39 bp, Salmo salar
caggaaacagctatgaccactcaaatttgggtctgaatg

SEQ ID NO: 119 - DNA, 39 bp, Salmo salar
tgtaaaacgacggccagtgacccttgggtaaatcaaatc

SEQ ID NO: 120 - DNA, 38 bp, Salmo salar
caggaaacagctatgaccgcgactgctgtcatgtctac

SEQ ID NO: 121 - DNA, 39 bp, Salmo salar
tgtaaaacgacggccagtcacaaccccatacattattca

SEQ ID NO: 122 - DNA, 37 bp, Salmo salar
caggaaacagctatgaccgggtagaggagaggaaagg

SEQ ID NO: 123 - DNA, 39 bp, Salmo salar
tgtaaaacgacggccagtgacccatggcaaatcttttca

SEQ ID NO: 124 - DNA, 34 bp, Salmo salar
caggaaacagctatgacccgtgaccgggaggctc

SEQ ID NO: 125 - DNA, 39 bp, Salmo salar
tgtaaaacgacggccagtggaaacagagttcgggacagg

SEQ ID NO: 126 - DNA, 38 bp, Salmo salar
caggaaacagctatgaccgcagaagaatgatgggcacc

SEQ ID NO: 127 - DNA, 39 bp, Salmo salar
tgtaaaacgacggccagttgtccaaatcctctttccctc

SEQ ID NO: 128 - DNA, 38 bp, Salmo salar
caggaaacagctatgacccatgtcacctggagctgatg

SEQ ID NO: 129 - DNA, 38 bp, Salmo salar
tgtaaaacgacggccagttgtagtgcccttgggttcat

SEQ ID NO: 130 - DNA, 38 bp, Salmo salar
caggaaacagctatgacctgcccagcattaggttaagg

SEQ ID NO: 131 - DNA, 38 bp, Salmo salar
tgtaaaacgacggccagtttgttggccaaatatgaacg

SEQ ID NO: 132 - DNA, 39 bp, Salmo salar
caggaaacagctatgacctgcaacattaccttcagcaca

SEQ ID NO: 133 - DNA, 38 bp, Salmo salar
tgtaaaacgacggccagttgggggtcatagagcaaaac

SEQ ID NO: 134 - DNA, 38 bp, Salmo salar
caggaaacagctatgacccagggcacagactacagtgg

SEQ ID NO: 135 - DNA, 38 bp, Salmo salar
tgtaaaacgacggccagtctgtcgggagaaacacgatt

SEQ ID NO: 136 - DNA, 38 bp, Salmo salar
caggaaacagctatgaccagccatcccaaggttctttt

SEQ ID NO: 137 - DNA, 39 bp, Salmo salar
tgtaaaacgacggccagtcattcaaattgacatcgcaaa

SEQ ID NO: 138 - DNA, 38 bp, Salmo salar
caggaaacagctatgaccgtcctacaagccctggtcaa

SEQ ID NO: 139 - DNA, 20 bp, Salmo salar
gccacaacaacagttgaacg

SEQ ID NO: 140 - DNA, 20 bp, Salmo salar
tcctccctctcagtctgtcc

SEQ ID NO: 141 - DNA, 20 bp, Salmo salar
gagtatgcctcgacccaaga

SEQ ID NO: 142 - DNA, 20 bp, Salmo salar
gctattcccacggagtacca

SEQ ID NO: 143 - DNA, 21 bp, Salmo salar
tgacaggataacaaccccatt

SEQ ID NO: 144 - DNA, 19 bp, Salmo salar
agccaggcagcagctctat

SEQ ID NO: 145 - DNA, 20 bp, Salmo salar
ttctgttcacgggtgattga

SEQ ID NO: 146 - DNA, 20 bp, Salmo salar
tggtggagcttcctgtcttc

SEQ ID NO: 147 - DNA, 20 bp, Salmo salar
tgtgcgctatcttggatgtt

SEQ ID NO: 148 - DNA, 20 bp, Salmo salar
caaggtgatttggtgggttc

SEQ ID NO: 149 - DNA, 20 bp, Salmo salar
tggaaactggaaaagaagca

SEQ ID NO: 150 - DNA, 20 bp, Salmo salar
ctgctttgtttggttgagca

SEQ ID NO: 151 - DNA, 20 bp, Salmo salar
aacttcccacaaaccacagg

SEQ ID NO: 152 - DNA, 20 bp, Salmo salar
tggggtaatgggacattgtt

SEQ ID NO: 153 - DNA, 20 bp, Salmo salar
atggctggtaaactgccaag

SEQ ID NO: 154 - DNA, 20 bp, Salmo salar
tgcacaggtgacattctggt

SEQ ID NO: 155 - DNA, 365 bp, Salmo salar
gagtgttcctgtcgtgtgttccagagagacaaagacacagcgatctgctgacaataggagcacagagctcagggaagtggtccttttcacctccacacagtctccatagaacacacacacacacacacacatacacacacacacacacacacacacacacacacacacacacacacacacacacacagccccaaatgacacgtcttgccaataatgtctgacctactggcaaataacattctcactccaatggtcattgccagcactgcagacatgttgactttgggggggatccactagttctagagcggccgccaccgcggtggagctccaattcgccctatagtgagtcgtattacgcgcgc

SEQ ID NO: 156 - DNA, 363 bp, Salmo salar
ctggaaactcaaagagtgcgaggatgagaacgcgaagccgggtaaaaagtgagtttcacacgcacgagcgcacccgagctcgcatgcacacacacacacacacacacacacatacacacacacactccaacagagaaatcccctgcctcccagatactcccccagcatccacaagacactactatgttatctgtataaccagggagtatgtgtgtaacatgtgatgtcccctctgatagagatcttacccagcccaagcgtcgtgacagacagatccagaaaatcaccaacgccacacggggggggatccactagttctagagcggccgccaccgcggtggagctccaattcgccctatagtg

SEQ ID NO: 157 - DNA, 312 bp, Salmo salar
gtattgtagctcgactcccatttagacaggcacaccccttagaggacagatagtcacacggtggatgtcaacattatcctcagtgtaaggttagctatggtaacatatttttggaggtcagaaacatacaacgatatgcacacacacacacacacacacacacacacacacacacacacacacacatcctcaaagaccacgatcaagaatattatcactcacagttgggcaggctgtttccagcgtagccatccattccgtatgccttcagcgctctgggggggatccactagttctagagcggccgccacc

SEQ ID NO: 158 - DNA, 313 bp, Salmo salar
aaaagtccctgatggtcaaacatcaggattagctttagattagcattaggcgctaactcgctaagcttcgcttaacttgctgagcaggtcctaaagaacaaatagctcagctctacccaatcacttcccctgatactgactgactgactgaacacacacacacacacacacacacacacacacacacacacacacacacacacacacacacacgctatagtatagtgtttgactgtgcagtgcagtcagcacatggatcatttgggggatccactagttctagagcggccgccaccgcggtggagctccaatt

SEQ ID NO: 159 - DNA, 419 bp, Salmo salar
gctttcccttatcttactacaccctcacacagaaacaaaacacttgcacattcgcatgcacacacacacacacacacacacacacacacacacacacacacacacacacctcccagcttgctttgcttgataaatatgatgacccagacaggctccatctcctgttgtgacctccctcacccccattaccccctcacccccctgccaagcctgggggggatccactagttctagagcggccgccaccgcggtggagctccaattcgccctatagtgagtcgtattacgcgcgctcactggccgtcgttttacaacgtcgtgactgggaaaaccctggcgttacccaacttaatcgccttgcagcacatccccctttcgccagctggcgtaatagcgaagaggcccgcaccgatcgccct

SEQ ID NO: 160 - DNA, 514 bp, Salmo salar
ctttgtcatcttattttggtgtccattaaggaactccaatactggagtggaaaaagatggtttgtttctagaaaagccaccgacgttgtagtattgttccctactgcctctgatgcaccactctgcctctcacaacccacagaacccagagtcagccatatctaatctgaggtccaacatcacacgactcctctccagcttcagggctacacacacacacacacacacacgtgaatattaacagagcagttccaaatgatgtcagacctcaggctagtaactatgctattcaatatatgtatgacttccaactatagtaactgtatttctctgaaatggtattcatagaaatgttagctaacaatggctggactagatggctggagtgctgtagaggcctaaacgttctgctttttctattagctagcctaaaccccatccagccattaaaagccattcaaacttctatagcagcatcataaattaaccaaacccattacgggccaaagagtgg

SEQ ID NO: 161 - DNA, 297 bp, Salmo salar
gaggatgaacagcagcatagcacacagagcactccgagtcagatcgctgggttggaactgggctgctgccttaaatagaactgtaaggggtgtgtgtgtgtgtgtgtgtgtgtgtgtgtgtgcgcgcgcgtgtgtgtgtgatctactatgtattctaagaggctctgagatagtgtggtgtgatgccacagcactctgaatcattgggataacagggaggctcggtcaaggcacagtgggctgcaggaattcgatatcaagcttatcgataccgtcgacctcgagggggggcccggt

SEQ ID NO: 162 - DNA, 280 bp, Salmo salar
gttcccagcctgagtagagcacctctctggtggacgggatcctccgagcgatcagaacccacagaggggtcagcgccacaaacacagcacacaccaacgggttggcatagtcgttaaactctataagagaacacacacacacacacacacacacacacacacacacaggggttaacatcatcgttatgctatataacacacacttcatcagctcaatatagaaactcagactgggtgtgaatgggaaatcgtcagtgtttccatgtatttatgtgtggtc

SEQ ID NO: 163 - DNA, 501 bp, Salmo salar
cagtagtaatggtatggaggttagagtaggaaggagtttctgtgttaccccccctcattaatgacagaacagaattaagagggttccacccaccagaaggtgtctaggagtatgaactaggggttgatttgggcatgtctaactgttaacttctctctctctctcctctctcctctctcctctctcctctctcctctcctctctcaggaacgatgggacagaatttgggggttctatctaccagaaggtggatgaccagttggagacggcggtcactctggcctggacggccggcagcaacaacacacgcttcggcatcgcagccaaatacgctctggacaaagatgcttccctgtctgtgagtaacacacacttacgtttacacacacgttccatttacacgctttaccctggcgggacttcagccagctttacacactaacacacgttctctggctgtctctaactgtgtgtccccctgcaggccaaagtgaataacgc

SEQ ID NO: 164 - DNA, 564 bp, Salmo salar
  misc_feature 128, 247: n = A,T,C or G
ctctgaaattcctgtgcggtttggaagaataagacatcccgcctactttaaaggcagtctttaaagcatgtgttacagcacatagaaatgctcttgtcatcatcttgggttagtttgaaatgccatgntgacattttccaaggtcacataggctagcgcttctgagtcaatgtctagggaaagtaagacggatgagagctgtcttcagtaggtctggataaggactgttaaatgagatgagagaaanctcatcagaaggctccatctctgtactgtatgtgtgtgtgtgtgtgtgtgtgcgtctgtgtctgaatctgttccagtactgctgagaagcatctcatggcacctcatttaattcaacatccacagcacggtaaacacagacacacatttccagtctcactactctaaagccctcccaatggctcgcaattcaatcatatcctgtctccttctatggactgtttcgaaattgacgtgtcagtcagaacatctgtgtgtgtggtatgtccacggactccacataattcacaaagaatatcagagtaggtggtgatgtag

SEQ ID NO: 165 - DNA, 377 bp, Orechromis niloticus
gaaatgtttcagggttcttgagaagtttccaggagtcagcaaataggttcaagtgggatttgaacatgttctaaaattcctgacagaagacagaatggtccatgaggaggctgagcagtccttcatcatgtttaaatagggttcctatgatttttttaaggggcttctttcttctctagtttcaagtgtctattattggtcattgagaaagttccaggagcactttcagaggttctgcaaacagatgttgttaaagaagctattgcagtagggctaatttgaaataggttgtctgattttgtcactgaagtactaaaagtatagtaaagaagtatagtctttgaaatgtttcagggctcttgaagattctgaaggtc

SEQ ID NO: 166 - DNA, 40 bp, Orechromis niloticus
tgtaaaacgacggccagttgttctaaaattcctgacagaa

SEQ ID NO: 167 - DNA, 37 bp, Orechromis niloticus
caggaaacagctatgacccttcaagagccctgaaaca

SEQ ID NO: 168 - DNA, 35 bp, Orechromis niloticus
aaaaatctgattttgtcactgaagtactaaaagta

SEQ ID NO: 169 - DNA, 30 bp, Orechromis niloticus
tctgattttgtcactgaagtactaaaagtg

SEQ ID NO: 170 - DNA, 30 bp, Orechromis niloticus
tagtaaagaagtatagtctttgaaatgttt

SEQ ID NO: 171 - DNA, 496 bp, Orechromis niloticus
aactcgagttttatggtcaccgatcaacaacctgcgaaaaaagataatctttactgtttttttccatcactatttattgtcatgacctttcatggacctttctttcatctgagaaaaatgtgctaaaatgcacatgatgtggtacaaagccactgtgtgctttttacacatattccatcttttgtaggatgtgtgtattctgaatacaaagattcttcaaagagtcataatctaaatagaaacaacattagagagaatcaatgtaactgcaaagtgtgtctcataagaccccaggagttccagtgtagtaggtgtgctgggtctataaatgcttaagaaggatgtaatacttaagcattatgaatgcccttgcagaagtaactcataataaataacaccaacccaaatactaagactaattaaaaaggtgaacataatattgtggctatctgtccactttcatcccaaccttagtacggcaatgctacatgaatat

SEQ ID NO: 172 - DNA, 37 bp, Orechromis niloticus
tgtaaaacgacggccagttatggtcaccgatcaacaa

SEQ ID NO: 173 - DNA, 38 bp, Orechromis niloticus
caggaaacagctatgacctagcattgccgtactaaggt

SEQ ID NO: 174 - DNA, 28 bp, Orechromis niloticus
aaaaacattcataatgcttaagtattac

SEQ ID NO: 175 - DNA, 23 bp, Orechromis niloticus
cattcataatgcttaagtattat

SEQ ID NO: 176 - DNA, 22 bp, Orechromis niloticus
atccttcttaagcatttataga

SEQ ID NO: 177 - DNA, 469 bp, Orechromis niloticus
agtagtgcacatgacacagttattcacatgaaaacattgcacgaaactcaatgtgactggattacctgatcatctttagtttgcaaataaacttactggtgaacaaaaacctgaaccttggtgactcctgcccctagtttgcttcaacaacccaatccaccatttttacatatctttagtcctttagaacaagttcatgcatcaaaatattaagtatacaaaaaaacactatcctcgttcttgttctgcgttttaatagcagaacatgacgactttgaaaacaggctgaaaacacagcacggtgctgctggagaaaagttgtgcgcctcagcacagttaaaatctatcaaacccgcattgctgtaaatgtaatcaaaagcccatcccggtgctctgccacatcgccgcttaattaaacggtgagaatattaatagaaaactgctttatgttgaagcagaaaataaatag

SEQ ID NO: 178 - DNA, 39 bp, Orechromis niloticus
tgtaaaacgacggccagtgtgcacatgacacagttattc

SEQ ID NO: 179 - DNA, 41 bp, Orechromis niloticus
caggaaacagctatgaccctatttattttctgcttcaacat

SEQ ID NO: 180 - DNA, 21 bp, Orechromis niloticus
tcttgttctgcgttttaataa

SEQ ID NO: 181 - DNA, 25 bp, Orechromis niloticus
aaaatcttgttctgcgttttaatag

SEQ ID NO: 182 - DNA, 21 bp, Orechromis niloticus
cagaacatgacgactttgaaa

SEQ ID NO: 183 - DNA, 717 bp, Orechromis niloticus
  misc_feature 91: n = A,T,C or G
agtctcttcatttgcaagccaccctttggagaaaactcatttctgccacttttatctgcgatcttgttcattctgtcactacccagagctnatgcaacaaagatcaactcgacagctttgctttcacgctcagctctttctttgccacaagagaccacaacagtctgtatcactgctgatgctgcaccaatctatctgatagtctcccgctcaactcttccttcactcgtggataagaccccagggattcctttacttggggcagtaactcattcctgaccctaagtagtcactctatccttcaccaactgaggactctgaccttggactttgaggtgcagtatggctactgaaccagatactttggttgtgcctggttgaacaaactcccacgcaacctaaaataaaaggaacaaactctctggtcccccttatcaaagtggggaaccacaattccgagttccaatccagatagattttcttagttttttgtgcccaccacaaagtcctgccctcaacccaatagaacatctttggaatgaattacagcagaaactgcgagccagagcagctcatgcaacatgagtgtctgacctcataaatacacttctggaagaacggttaaaaattcccataaacacaccttatggaagtcttgaagtgttgaggctctttgagcagcaaagggtgggacaacatcattttaaccctatcgat

SEQ ID NO: 184 - DNA, 38 bp, Orechromis niloticus
tgtaaaacgacggccagtgccaccctttggagaaaact

SEQ ID NO: 185 - DNA, 38 bp, Orechromis niloticus
caggaaacagctatgaccaaaatgatgttgtcccaccc

SEQ ID NO: 186 - DNA, 23 bp, Orechromis niloticus
aaaaagagggcaggactttgtgc

SEQ ID NO: 187 - DNA, 18 bp, Orechromis niloticus
gagggcaggactttgtgg

SEQ ID NO: 188 - DNA, 19 bp, Orechromis niloticus
tgggcacaaaaaactaaga

SEQ ID NO: 189 - DNA, 468 bp, Orechromis niloticus
atacatggcttaaataaacaaagtcacttctattatccatccattcatccatggatgtggagcagtagcgactacctcacagtccactagtccccagttgtgttacagaagttcttcagttatctgcacgccacctggatagaaagaaaaaagcaatctatcaaatatgttttttgtcttcttcctgtgcacttgtgctctaatcaggtgatttcggttaatgtggaaaatagtggagcggaacagcaaaacaggttttgaggagtgaaaatacacatggacattgcttttatttttattgcacaaaaggagcatgatggtaaaggggaagctgcatccaggacagaaacagctgcattttactgcatttttcagcttctttcaagcacctgcacaaacagcatcctaatgctaagctaaccaggagcccagagtcatgacaaagctgagtgaatgcccaaccccatt

SEQ ID NO: 190 - DNA, 41 bp, Orechromis niloticus
tgtaaaacgacggccagtcatggcttaaataaacaaagtca

SEQ ID NO: 191 - DNA, 38 bp, Orechromis niloticus
caggaaacagctatgaccgttgggcattcactcagctt

SEQ ID NO: 192 - DNA, 26 bp, Orechromis niloticus
aaaaacactattttccacattaacca

SEQ ID NO: 193 - DNA, 21 bp, Orechromis niloticus
cactattttccacattaaccg

SEQ ID NO: 194 - DNA, 20 bp, Orechromis niloticus
aaatcacctgattagagcac

SEQ ID NO: 195 - DNA, 528 bp, Orechromis niloticus
atccctgccacactgctttggctatttgcaccgaaaccccccacttccagcttccagtaatggaggacaactaatcagaatagagctggtttaaaagggggaagagttaaaacagtttgcccctcaattcattgtcagtctgaaataatgtcacgggtatacagcgaatgaatacatttaaaagagtttccaccatgttgttacaacagcactttgtcttttgtgttataattatatatcattttaaataagagttctttggttttattgggcaaaacacagtatttgcaggggagagtaaaaagactgctcttatccatatatataagcatatgagcgcagtcttacttggttcgtagtaatcatagatgacaaccgtagcttcctggactttggcaactttatactcaataatcagaggaatctggacacacatctccgcgttgtcacctggaaataaatgtacaacttaagcttcagtatttacactcagacacatcagtgtttgtgagccgctcactgagtcca

SEQ ID NO: 196 - DNA, 38 bp, Orechromis niloticus
tgtaaaacgacggccagtgccacactgctttggctatt

SEQ ID NO: 197 - DNA, 38 bp, Orechromis niloticus
caggaaacagctatgacccggctcacaaacactgatgt

SEQ ID NO: 198 - DNA, 22 bp, Orechromis niloticus
aaaaatccaggaagctacggtt

SEQ ID NO: 199 - DNA, 17 bp, Orechromis niloticus
tccaggaagctacggtc

SEQ ID NO: 200 - DNA, 23 bp, Orechromis niloticus
gtcatctatgattactacgaacc

SEQ ID NO: 201 - DNA, 618 bp, Orechromis niloticus
tacacagacctgggcaatttaaagttgcattgtggatcacgattggttaaaaaccaacgaactgcaaattcacgcttgatatttcatattttagtgaacacagagaaaatttctttctttagaatgaaaatgagttgttttctgagaacaaactggtttgggattgtaaaagacatctatatacatttttattgcactttaaatgtctggtgaagtctgacactctttaaatgaaaccaagacttttgtgaattgctggattgatggcggtcataaaatatgacaaaatgctggtgatgtcgacagactgctgtggcagccgcgaggagagggcggcttctcgtgaggtcatatccagagacaatactttaagacttgtttgctctattaaaaagttggatgaagttctacttttgtaaatgcgcggtagatcattttgttcccggctctcaatcactcgccaattcttcattcacctcaattagatttctcacatcattaccaatgtttagtgacagctgtagattatgcagaatgtcttgctgatttaatcacccttaatgactgggctagtcctgtgaagattgatacaaacatctttcccagaggcagaatgga

SEQ ID NO: 202 - DNA, 38 bp, Orechromis niloticus
tgtaaaacgacggccagtcaacgaactgcaaattcacg

SEQ ID NO: 203 - DNA, 38 bp, Orechromis niloticus
caggaaacagctatgacctctgcctctgggaaagatgt

SEQ ID NO: 204 - DNA, 20 bp, Orechromis niloticus
gggaacaaaatgatctaccg

SEQ ID NO: 205 - DNA, 24 bp, Orechromis niloticus
aaaagggaacaaaatgatctacca

SEQ ID NO: 206 - DNA, 22 bp, Orechromis niloticus
cgcatttacaaaagtagaactt

SEQ ID NO: 207 - DNA, 592 bp, Orechromis niloticus
  misc_feature 536: n = A,T,C or G
tttcacagcatagtcagagatgctgctgcactcaatctatggagatcaaatacaacaaacagacacatcaactatatcaagggaccatcgctagctgtgagtgatgtcattaccattgattggtgaataaaacacctacccctataaccttcttggctccagctttggcggcaaacatgcaaaggatacccgtcccactgcccacatcaagcaccaccttgtccttaaaaaggtgcttgttgtggaacatggaattgcggtacgtgagagtgcgaacttcatccttcagcatctcctacagcacaaaagcaggattcatgaatacacacacaagtttccttgagttactgctctaaacacacagattacaaaccagaaaaatacctcatgaattccaaagtgggcgtatgagtcaaagtagtagtccttagatgtcatgtcctcagctgcaggcttggctgagctctccccctgggaaacctcacagaagaccaagatcgtctcaattaaacatcatctttgctaaactcagacanccagcagctttgctggcttcaaaccattaaatgtattaatatagcaactctgttcc

SEQ ID NO: 208 - DNA, 38 bp, Orechromis niloticus
tgtaaaacgacggccagtgatgctgctgcactcaatct

SEQ ID NO: 209 - DNA, 38 bp, Orechromis niloticus
caggaaacagctatgaccatggtttgaagccagcaaag

SEQ ID NO: 210 - DNA, 24 bp, Orechromis niloticus
aaaaagatacccgtcccactgcct

SEQ ID NO: 211 - DNA, 19 bp, Orechromis niloticus
gatacccgtcccactgccc

SEQ ID NO: 212 - DNA, 22 bp, Orechromis niloticus
acatcaagcaccaccttgtcct

SEQ ID NO: 213 - DNA, 543 bp, Orechromis niloticus
gcttaagcacccagactctactccagaggcatgttcatgtaatatgtgcagaatgtggtttgtgcttgtttttaagcaagaattctgtgagaaagcaatctgctggattttgcccatgttgctcccaaacttagttaaaggtttaatttgataggctattaaacagttttcaatcaaacacaagatttatgtgatttgcaaacttaattctgcttttatgtatttgttttttgtttttttttaaacagtgtcccctcttttaaataaagggctcgaaaggaccacagtactgtaatttgggaattaaaaaataaagcaaaccaaccttgcaaatgtgccgtaaactgcccatttattgagctgctttgtagtcatgccacacccattgtccaggacaatgactgcaggcttcccgagactttcatcaaacagctgttaaacagatactaatactgagttaccggtcttctggatgcatgagattaagccagtattcaataaacatacagtgggggaaaaaagtatttagtcagccaccaattg

SEQ ID NO: 214 - DNA, 38 bp, Orechromis niloticus
tgtaaaacgacggccagttctactccagaggcatgttc

SEQ ID NO: 215 - DNA, 37 bp, Orechromis niloticus
caggaaacagctatgacctttcccccactgtatgttt

SEQ ID NO: 216 - DNA, 25 bp, Orechromis niloticus
aaaaaagtactgtggtcctttcgat

SEQ ID NO: 217 - DNA, 20 bp, Orechromis niloticus
agtactgtggtcctttcgag

SEQ ID NO: 218 - DNA, 20 bp, Orechromis niloticus
ccctttatttaaaagagggg

SEQ ID NO: 219 - DNA, 472 bp, Orechromis niloticus
atgtttaagtgaacatcacatacacaccatcacacgtgcccgcatgggagtggactgaatgcagcatggacagcaggggaggaggagaaagctattcaataccttgtctgtcaggcaccttcccagccctcgttcatgttttataactcgaagaggcacgtatcttactgtagctacttttgtgcatgccccgtcccaggagcaggagaatgtgcctccgcctaagcttgtgtcatctcacacagcagctcaccatctcactcaaactgatagtttgatcaaaagagacatagatattgaaaagagctttcccctggtggcagggctgtgacaatacgacgacaaaattaaatcacttttctttctctctgtctgccagcccgctgcctgccaatgtgttattcacaattcgagtcctaatctcgttagcccaaaattgtccaatttgatttaatgtgcattctgtccttga

SEQ ID NO: 220 - DNA, 39 bp, Orechromis niloticus
tgtaaaacgacggccagtgtgaacatcacatacacacca

SEQ ID NO: 221 - DNA, 39 bp, Orechromis niloticus
caggaaacagctatgaccaaggacagaatgcacattaaa

SEQ ID NO: 222 - DNA, 24 bp, Orechromis niloticus
aaaaattctcctgctcctgggacg

SEQ ID NO: 223 - DNA, 19 bp, Orechromis niloticus
ttctcctgctcctgggaca

SEQ ID NO: 224 - DNA, 19 bp, Orechromis niloticus
gggcatgcacaaaagtagc

SEQ ID NO: 225 - DNA, 770 bp, Orechromis niloticus
tgccaggctgcctgtgtagaatgtagactagcattccagtgttcacaccatggagggatccgcagcttgtatttgtggagaagccggctcaccgtaagtcttcttgttaattcaagggtttcactttttaaaagcaactattacatcaatcacacaagagatgctgtataccgaggaaaaaactcaccacaactgatgtctacagtaccctccctagagaaattcacaccaagatccatacaggagaggtgtcactttaattatcacggtgtgaatgagaggcgatccctgataagtgcagcacaaatacagcagtcaaacttttcttaaaagccataagcaatgacatggttttctttttgcaggacgtacaaagtaaaggttggggtccgggtccattttattgttattaacaactgatcaaacaaataaataaataaaactaatcccgttttaccacctctcacatctcattgatccactgagacggtgtgactgctttctttctttgatctcatatgaatagccccacaccgaagtagccattcacccataattatatgttattattattctcctgactccaccatttgactaattctgttttccacatcgctaacaccagcagttacaggcattagaaacattttctttttttgtattgtcttttatttctgcattgcgacattcagggtgtgattgtgtaatcatcatcatgctcctgtggaaatcaatggcaggtctgtgttctattcctggctactacaaat

SEQ ID NO: 226 - DNA, 40 bp, Orechromis niloticus
tgtaaaacgacggccagtggctgcctgtgtagaatgtaga

SEQ ID NO: 227 - DNA, 38 bp, Orechromis niloticus
caggaaacagctatgaccgaacacagacctgccattga

SEQ ID NO: 228 - DNA, 25 bp, Orechromis niloticus
aaaaatgctgcacttatcagggatc

SEQ ID NO: 229 - DNA, 20 bp, Orechromis niloticus
tgctgcacttatcagggatt

SEQ ID NO: 230 - DNA, 19 bp, Orechromis niloticus
gcctctcattcacaccgtg

SEQ ID NO: 231 - DNA, 401 bp, Orechromis niloticus
acctgcagttggtaagggactacatgttgcagaaacatgtcatattgggctttactgtcatagactgtgaagatggagatggagatggaatgaaccatttatacccatcttgaaacctaagctttagctatatgtactgcttagtttttttaaataagtgatcatatttcaattaaaggttggagcagtaagctaatgctagcactaataaggaacatccaaagacttgtctgtcacacagaaaccttctaataaatgctcagtacattccaataaaatcccagaattttactactcaaactggagcacagacttcttggacagtctgtcagtacagttaactacacaacagccgtattatgtgttccaaaagtgatggtgagtttaaccaggtgaggtaa

SEQ ID NO: 232 - DNA, 38 bp, Orechromis niloticus
tgtaaaacgacggccagtcctgcagttggtaagggact

SEQ ID NO: 233 - DNA, 39 bp, Orechromis niloticus
caggaaacagctatgacccaccatcacttttggaacaca

SEQ ID NO: 234 - DNA, 26 bp, Orechromis niloticus
aaaaatgaaatatgatcacttatttt

SEQ ID NO: 235 - DNA, 21 bp, Orechromis niloticus
tgaaatatgatcacttattta

SEQ ID NO: 236 - DNA, 22 bp, Orechromis niloticus
aaaaaactaagcagtacatata

SEQ ID NO: 237 - DNA, 536 bp, Orechromis niloticus
gtatactcctgctgcgtaaggcaaacagcagtggtgactaatacagccacactcctgactttgaacctaaaaaaacatccagtccaatgcatctgacatagaaaccgcctgcctgtactttgctatttctggcaatgggatacaacacctctgactaaccagtgtttgctgggtgttaattacaaatactctaattatacactttggaaatttcagcaaatacacattactgtgcaaaggtcttgaggcaatcctcatgccttgatatgtttctaggaaaatgggaagtaggtgcagcgatttgcatggacacgtgcacgaaaaggacaacagagtttttacaattccaacaaacttcaaagtcaatatttgctgtgaccacctttattcttcaacacagcctgaactctcttaggaaggtttctttacgtagtcttcaggaatagttctccaggcttcttgccggacatttaaagctcttttctgtgaagatgatcccacactctgtcagtaacgttgaggtctgggctttggga

SEQ ID NO: 238 - DNA, 38 bp, Orechromis niloticus
tgtaaaacgacggccagtatactcctgctgcgtaaggc

SEQ ID NO: 239 - DNA, 38 bp, Orechromis niloticus
caggaaacagctatgaccgcccagacctcaacgttact

SEQ ID NO: 240 - DNA, 23 bp, Orechromis niloticus
aaaaattgaggcaatcctcatgc

SEQ ID NO: 241 - DNA, 18 bp, Orechromis niloticus
ttgaggcaatcctcatgt

SEQ ID NO: 242 - DNA, 23 bp, Orechromis niloticus
cttgatatgtttctaggaaaatg

SEQ ID NO: 243 - DNA, 712 bp, Orechromis niloticus
agcagtggaagcagggcgtttggactgaaacatgcggcggtaagactggctgatgtcgctgttcctcgggatggtggaggatttgtcaaagtctgaggactgctgctccacttcctgatctgctcccacagtgtagtagtcacagtccgatactacagagaccaggaggggggagaatttagcatgataatttaatttgtttgaatagagctgtctgcagagtcagtgtaactgctgatgatctcaagcatttctctgatattatataattaaagtcttcttaattcaagttaactttaattagattttttctgttttatatctatgagtatagctcagagcgagatttgacaagtttagaagagacacaatgaaagtttgtttttcagtaatatacaattcaggtttgtttctgggtccatatttaggtaaaagaacatttgttattcacagctgtctttctgatttcccgaatattgttggtgctgataatggtaggtaatattggagctgcctcttagcagccaggcatcctttgctggagataaactgtgaaatagtttgtacttaattaatctggtgggagtaagttaagtaagtttaccctgtgaggggatggtgtcctctgagcagcagggtgtgttggtctggctgctgtagccgctggagccctgcagggaatctctgctggagccgtggatgtccagctgga

SEQ ID NO: 244 - DNA, 19 bp, Orechromis niloticus
agggcgtttggactgaaac

SEQ ID NO: 245 - DNA, 19 bp, Orechromis niloticus
acggctccagcagagattc

SEQ ID NO: 246 - DNA, 31 bp, Orechromis niloticus
aaaaacaatattacctaccattatcagcact

SEQ ID NO: 247 - DNA, 26 bp, Orechromis niloticus
caatattacctaccattatcagcacc

SEQ ID NO: 248 - DNA, 22 bp, Orechromis niloticus
aacaatattcgggaaatcagaa

SEQ ID NO: 249 - DNA, 442 bp, Orechromis niloticus
gtggtagctcctgcagtgatttgagcaccaagtgaacagatgttatgttgtcgtcagctccttttcccagtgcctgggacagctgttcaagatcctttattatatgcagcctgagaaacaaactgacgtccttcacgggtggctggattatctgttggacaacctgaacaaagaatgagtgacagcatcattgttagacgtaataaaacaagcgacatcattcattgagttttgcggattgttaatgaactcgatggaatgatttgagagcttggctacacataaactaaaaatatgctaggagttaagctgcttagatattgccactactgtacaaagtaactctcacttcagatacttcatttacaaatgattaggatccacaaaaatagagtaattatgatctgctcacctcaggtttctctgaggctcccagcatcat

SEQ ID NO: 250 - DNA, 20 bp, Orechromis niloticus
tcctgcagtgatttgagcac

SEQ ID NO: 251 - DNA, 20 bp, Orechromis niloticus
ggagcctcagagaaacctga

SEQ ID NO: 252 - DNA, 28 bp, Orechromis niloticus
aaaaactaacaatgatgctgtcactcac

SEQ ID NO: 253 - DNA, 23 bp, Orechromis niloticus
ctaacaatgatgctgtcactcat

SEQ ID NO: 254 - DNA, 21 bp, Orechromis niloticus
tctttgttcaggttgtccaac

SEQ ID NO: 255 - DNA, 562 bp, Orechromis niloticus
aatttagttagactctcgagattttaaatacaataaaaacagtataacctggtagtaacacatgtcgtactccaactggtggtttgttagttaagccacatgtggatttaagccaccagctgacaaaactattcactagcagcatttaacctatgaatgctaaagcgagctagcagaggttggttagctaactggctggctaggtagccatgtggaatcgaccacgagatctattcgcccatatgtgaatggagcggtaaatagatttacgacgcaagacagagtaacgccatgaaatacccccctgttcccaaacgacaaaaacacccccttcctttctgcagtttacctacttacggtgacggtttgggtccaggggtagaataacaccggtaaagttcacgacaacgtcagtgaccgtagttgacaagggtccgcccactaccagactcatctgtgcattggctcatgtgcatctcatgccggcagcaattggctgaagctaggacaacccttttgtagtgacgtatcattagattaatttactgaacattcgctgaat

SEQ ID NO: 256 - DNA, 39 bp, Orechromis niloticus
tgtaaaacgacggccagttgtcgtactccaactggtggt

SEQ ID NO: 257 - DNA, 38 bp, Orechromis niloticus
caggaaacagctatgaccttgtcctagcttcagccaat

SEQ ID NO: 258 - DNA, 27 bp, Orechromis niloticus
aaaaaatctatttaccgctccattcac

SEQ ID NO: 259 - DNA, 22 bp, Orechromis niloticus
atctatttaccgctccattcat

SEQ ID NO: 260 - DNA, 20 bp, Orechromis niloticus
atatgggcgaatagatctcg

SEQ ID NO: 261 - DNA, 730 bp, Orechromis niloticus
atgagacagggttaagctgtgagcataaaagatgctcaaatgacaggaagaactgcagagatcgagaacattttggaaagcaaagttgaaacacagctgactgatgacacagatggaccaggatcaagtacacgatttgactgtgtgcgccaagctgtgctgtggcatgccttcgactaatcagctctgtgtctctgccacctgcactgagctctcatgaagcagaggggcatttgaggacttgaaataaagacttgtgtattccttgtcatgtgctttccttttcaacacattaagtttcaattttcatatatactaaatcatgatcggcaagtactgcagctagataaagatagccagggcttatcccacaaactaaagaatttgcaaagatatgagaaaaagagcttcgatagaaaactttgtggtccagagtgattagcatagcaatttttctgcttttctgcttgccttgcaactaatttacccaaaagcacaatagttttatataataaaggcttaataaggctccaataggttctctcaaatctgctcaaaagaaaaagtcaacaacagaaaacctcaaaaattaccccaatgtaactccaccacagatttctttcatgaccccaaaagaatgaggttacaggctgtccattcacttggacacaaagacaaagtccccattatggttgccttgctcttttatagaatcctaacctatacagtt

SEQ ID NO: 262 - DNA, 38 bp, Orechromis niloticus
tgtaaaacgacggccagtacagggttaagctgtgagca

SEQ ID NO: 263 - DNA, 38 bp, Orechromis niloticus
caggaaacagctatgacctaaaagagcaaggcaaccat

SEQ ID NO: 264 - DNA, 26 bp, Orechromis niloticus
aaaaaggcatttgaggacttgaaatg

SEQ ID NO: 265 - DNA, 21 bp, Orechromis niloticus
ggcatttgaggacttgaaata

SEQ ID NO: 266 - DNA, 24 bp, Orechromis niloticus
aagacttgtgtattccttgtcatg

SEQ ID NO: 267 - DNA, 501 bp, Orechromis niloticus
ttattcatttgtgtcttgtcaagattgtcctttttcagtataggttttattacagcagtttttagtgattctggaaacacacctgatattaaagaaaagttgacgatctgtaacaggtcatagatactgaaactacatgtttsgtcaatctccgaccaaaattcactgagccagcagcaaaagaagaccaaatttatgcttcatgttagaaaaacattgtcatgaattccaaaaatgtcatccaaaaatgttaagggaaaagctataactcacctagagctgtccatgatactgtgcaggcggtgggcgatggtaaggactgtgcagtctgagaactctttgcggatggtgttctgaatcaggttgtctgtctccaggtcaacagctgccgtggcttcatccagaattaggatacgtgactttctcaggagtgctcgagccagacacagcagctgcctctgcccaacactgggaagatcgtaggtcatagctgtttcctgg

SEQ ID NO: 268 - DNA, 40 bp, Orechromis niloticus
tgtaaaacgacggccagtcctgtagttattcatttgtgtc

SEQ ID NO: 269 - DNA, 38 bp, Orechromis niloticus
caggaaacagctatgacctacgatcttcccagtgttgg

SEQ ID NO: 270 - DNA, 33 bp, Orechromis niloticus
aaaaaggtcatagatactgaaactacatgtttc

SEQ ID NO: 271 - DNA, 28 bp, Orechromis niloticus
ggtcatagatactgaaactacatgtttt

SEQ ID NO: 272 - DNA, 22 bp, Orechromis niloticus
gtcaatctccgaccaaaattca

SEQ ID NO: 273 - DNA, 404 bp, Orechromis niloticus
gctcagccttaatctttggaattaaggatccatgaatctgatttaactgaacaactatagacaatgcacttttcatttcatttctctgaatctatactttgagtttcagtttgtttgtgtttattcaaccataaaaagctgctgcttctaatcaaaggcgctatgaaatcttagctatcgctggaacaaatctttgaggtgtctgatgaacaagatttgctacaaggtgcccaaaatctaatctgatcatctactgcctagatgtcstacgcaacagacagttccttctgcagatgcatttctttaactttggtttacctgctcctctactttcacagagtaatcctatagcatcttggcacacaatggcagaaaaaaccttggtggactgggactggcccgtc

SEQ ID NO: 274 - DNA, 38 bp, Orechromis niloticus
tgtaaaacgacggccagtcccagtccaccaaggttttt

SEQ ID NO: 275 - DNA, 38 bp, Orechromis niloticus
caggaaacagctatgacccgctcagccttaatctttgg

SEQ ID NO: 276 - DNA, 31 bp, Orechromis niloticus
aaaaatctgatcatctactgcctagatgtca

SEQ ID NO: 277 - DNA, 26 bp, Orechromis niloticus
tctgatcatctactgcctagatgtcc

SEQ ID NO: 278 - DNA, 22 bp, Orechromis niloticus
tacgcaacagacagttccttct

SEQ ID NO: 279 - DNA, 478 bp, Orechromis niloticus
cttacaaatgggaaagtgaggacacgtcattaaagatgccatcgggaagctctgagatttcattgccatgaagagaccttaagggtgaaggggaaggagaggacaaaaagagaaaattcatgaagacatctgagcacagaaagaaaatcatactattagaacaaagttcaatagaagatttactgattggtcaactgccagaaaatcaactagtttttgatttgttaaaacacactagtatcaatttttttttaaaaagacaagtatttgaacattgtccatgaaatgtcccatttcagtatttatagcagtgctcctgtgtccaaatggtaaagctatatttttttgaaagtaaaccaaagagtcgatatattaattgtcagtgctgggttgattgctttccaacaaaccaaaaccagaaatatcaggaacaatggcgcaatgttgtcttggcattctaaatgagcgggaggtggtt

SEQ ID NO: 280 - DNA, 38 bp, Orechromis niloticus
tgtaaaacgacggccagtaatgggaaagtgaggacacg

SEQ ID NO: 281 - DNA, 38 bp, Orechromis niloticus
caggaaacagctatgaccgaatgccaagacaacattgc

SEQ ID NO: 282 - DNA, 26 bp, Orechromis niloticus
aaaaaccatttggacacaggagcact

SEQ ID NO: 283 - DNA, 21 bp, Orechromis niloticus
ccatttggacacaggagcacc

SEQ ID NO: 284 - DNA, 26 bp, Orechromis niloticus
gctataaatactgaaatgggacattt

SEQ ID NO: 285 - DNA, 497 bp, Orechromis niloticus
acatttagattcccaaagcttcattattttatttgaacttatactatatccatttacagatgcacacaagtatggttttaagacacaattggaagtatgactgtgctggtttgggtcaaaaatgtcatctacctaccaacaagcagagggtaaacagaaatcctgtccataggcttgatttcttgcatttgcgtaatatctctgttttagaaatcacatgactatccagcgttgcaaccaggaaagagttgcagtcttacgcacctctctgcagtttctctcctccttctatgaccccaaaccccatcaccatagaaactgtgtctgctcacagaccaacgaaccaaccaaaactgaattaagcataaaacaatcacaaagaaagaacaatacagtttcctcagctccatcagcatgtctgttataccccattcctaaaagaatgcttaaagacttcctaccgttggttaaatgattcactataaaatgttgtggag

SEQ ID NO: 286 - DNA, 40 bp, Orechromis niloticus
tgtaaaacgacggccagtcatttagattcccaaagcttca

SEQ ID NO: 287 - DNA, 40 bp, Orechromis niloticus
caggaaacagctatgacctgaatcatttaaccaacggtag

SEQ ID NO: 288 - DNA, 31 bp, Orechromis niloticus
aaaaattttaagacacaattggaagtatgac

SEQ ID NO: 289 - DNA, 26 bp, Orechromis niloticus
ttttaagacacaattggaagtatgag

SEQ ID NO: 290 - DNA, 19 bp, Orechromis niloticus
tgtgctggtttgggtcaaa

SEQ ID NO: 291 - DNA, 448 bp, Orechromis niloticus
atgttgcttgtcatcccacagtttgtgatataaaaaagcacagcttctgtgcattcctccagcttggttgaattaatcccaggttgtgtgatcaaagcagtcctgtagctgtgattgagcctcttcaggctgtgatcgtcttcattcstgactttgtacttctagcagaaaatgttgcaaatgtcacatgctggtagaagttggggagtactgttttaagacaccagtggttaaagtcgcccacatgtgggtgactgaatggatgcgctgctgtttgataatgatggcattagcatctggtgggatgaagacaacagtgactatcaccactgaaaactaaatattatatttacctaatgttaattttcctctaattattggagttagaagtgtagtttaaaagttctgaaacactcttaagctgcaaatattcacaagatgttgtaaa

SEQ ID NO: 292 - DNA, 40 bp, Orechromis niloticus
tgtaaaacgacggccagtcatttatcagttgccatgtagc

SEQ ID NO: 293 - DNA, 38 bp, Orechromis niloticus
caggaaacagctatgaccttggatgttgcttgtcatcc

SEQ ID NO: 294 - DNA, 27 bp, Orechromis niloticus
aaaaaaggctgtgatcgtcttcattcc

SEQ ID NO: 295 - DNA, 22 bp, Orechromis niloticus
aggctgtgatcgtcttcattct

SEQ ID NO: 296 - DNA, 26 bp, Orechromis niloticus
tgactttgtacttctagcagaaaatg

SEQ ID NO: 297 - DNA, 397 bp, Orechromis niloticus
acggccagtcacacagcccctttctcaatttgatgacacatgtatcggtcccgctgctagctgtttaataaagtcattgacaaagagccagcatgagacagtgtctgaaagcagtttcaagagttgtgtgagagttggcaacagtctgatacsgaaggagatagagatgctctcccgcagggtgtgatttagacaggaggcggaactgagctctggtgggctgcgacccatttaacccctggaagtgacgctgctgttctttcacagttaatatcagtgttctatttaatagccataatttatacaggtttattgtttgaaaccttttgcatacactatattgccaaaagaattcactcactcatccaaacaatcaaattcaggtgggtcatagctg

SEQ ID NO: 298 - DNA, 38 bp, Orechromis niloticus
tgtaaaacgacggccagtcacacagcccctttctcaat

SEQ ID NO: 299 - DNA, 40 bp, Orechromis niloticus
caggaaacagctatgacccacctgaatttgattgtttgga

SEQ ID NO: 300 - DNA, 29 bp, Orechromis niloticus
aaaaagagagttggcaacagtctgatacc

SEQ ID NO: 301 - DNA, 24 bp, Orechromis niloticus
gagagttggcaacagtctgatact

SEQ ID NO: 302 - DNA, 23 bp, Orechromis niloticus
gaaggagatagagatgctctccc

SEQ ID NO: 303 - DNA, 605 bp, Orechromis niloticus
tttcttttataatgcaatataatctgcatataaacatttgagattataaaaagcattcaaaagcatttaagattataaattcaactcaacagtttaaagtggttatcactacacctgcaacaaaggttaatatgattatgttattaatgcaatggtaatgatgatgattatgcacaatagcagcaaaatatttccctcatatcaacagtaataatattcaacattgctgtcaatacatttttcaaaaaatgcctctctgtgcaaaatgggtttaaaaacataaacaactgtcagatgctgtttgtctgtgatttgaaaagggggaacaaattgtggcaggatcagcctgatattatttgtatcccactgtaactttactgtataaagagctaacatgtccaaaatgtcaggagtagtcattacaagaagtgtttgtgaactaaaaatcaagaatgtgggatcctgtttgtccgtgatttggagagcccagcgcgtgctcccgacgcaggggagacctcaccttggcacttgtgcaggtgaagccaaatggaagatatgccccgtcaaaaacctgtccattatgctagcagtgtccgagcgttttt

SEQ ID NO: 304 - DNA, 44 bp, Orechromis niloticus
tgtaaaacgacggccagtcatttgagattataaaaagcattcaa

SEQ ID NO: 305 - DNA, 40 bp, Orechromis niloticus
atcaggaaacagctatgacctcttccatttggcttcacct

SEQ ID NO: 306 - DNA, 32 bp, Orechromis niloticus
aaaaaacattcttgatttttagttcacaaaca

SEQ ID NO: 307 - DNA, 27 bp, Orechromis niloticus
acattcttgatttttagttcacaaacg

SEQ ID NO: 308 - DNA, 27 bp, Orechromis niloticus
cttcttgtaatgactactcctgacatt

SEQ ID NO: 309 - DNA, 805 bp, Orechromis niloticus
  misc_feature 3, 7, 12, 14, 15, 18, 43, 99, 133, 556, 670, 677, 718, 727,740, 753, 755, 771, 794, 805: n = A,T,C or G
tgngttnttccnannganctctttgaagcccccctcgaggttnacggtatcgataagcttgatatcgaattcctgcagccccctgagggacgggcgcgnacacacacacacacacacgcacacacacgcacanacacacacacacacacacacacacacacacacacttactcttactcttactgtagtggcgagggtgtatttgatgctgatgacgggcaaccgagcatcgatctgcacacacacacacacacacacacacacacacacacacacacacacacacacacacacacacacacacacacagagggcgagggggcgacggttgcaacagtccagttgcggtcgaggcattgtggtgggtggttggcgggcgtccgagtcgttttgtgcctcctctaactcgtcttctcctggcaggactgacagaccgacacaaagtcacgcaggaaagaagcacggcttaggatggcgagtgcggcgccagccaggaagccgtgggggatccactagttctagagcggccgccaccgcggtggagctccaattcgcnctatagtgagtcgtattacgcgcgctcactggccgttgttttacaacggtcgtgactgggaaaaccctggcgttacccaacttaatcgcctttggagcaaaattcccccttttngccaggntggcgttaaataagcgaaagaaggccccgaaccggattcgnccctttccnaaaaggttggccncaatccttgaatngncgaaatgggaaatttntaagcgtttaaatatttttggtnaaaaattcgcn

SEQ ID NO: 310 - DNA, 413 bp, Orechromis niloticus
atctgactgtagcaaatttgctaaccagtcagtgtcattgcaattcttcagatacatgaaacatttctgtggcactggtacatgagacatacttaccaaattccacagcatatttctctccgaggctcttgccatctttttttttttttttaagctatgcagaaggttgcagtgtttctactggaaactgtttatcctccaaacagcctgcttaaaatcaatattttacctccaatctccagttactattccactgctcttctttgtctgctgtgtgtgtgtgtgtgtgtgtgtgtgtctgtgtgtgcgcaaagtgtgtgtacagctgtgcacaaatgcaaatgattacaaagagccccgacacagacattgaaatacctgctgatatgcttaaagttgatatgatagtagat

SEQ ID NO: 311 - DNA, 605 bp, Orechromis niloticus
  misc_feature 2, 3, 4, 5, 15, 30, 394, 420, 452, 467, 470, 476, 483, 489,502, 505, 508, 515, 517, 519, 525, 534, 535, 541, 543, 548, 551, 552, 553, 554, 560, 570, 573, 575, 577, 585, 592, 593,594, 595, 599, 603, 604: n = A,T,C or G
tnnnnctctgaacantctttggcctttccngccccttctcgaggtcgacggtatcgataagcttgatatcgaattcctgcagccctttagcactgatgtgagttagcagaagatctggcagaggtctgttgtgaatgctggtcttatatgctggtggcttgattggaaccaggcgtggagactgattggaggctctgcctgaaggtggagcccagtggagtggaaaaaccccacactcacccagaccataacatatagttggtttacacagctttgtgtatgtatgtgtatgcatgtgtaatgtatgtatagacacgtgtgtgtgtgtgtgtgtgtgtgtgtgtgtgtgtgtgtgtgtgtgtgtgtgatttacattgctgtgcttgagagccancatctaccggaaccaaattccttgtntttgtctgcacatatacttgggggggatccanttgttctagagcggncgncaccgnggtgganctccanttcgccctatagngantcntattacncncncttcanttggccgtnntttttncnaactntcnnnnacttgngaaaaacccntgncngnttacccanctttaannnncttnctannc

SEQ ID NO: 312 - DNA, 345 bp, Orechromis niloticus
  misc_feature 38, 231: n = A,T,C or G
aaatcacacatatgtgcacacataccacacgcgcgcanacacacacacaggcgggtatccccgaccctgggggagctgcttggttctcccacactcgctgtcattttttttttttttttttcttactgcagtgttttagaacattttatctaaactctggaggatcgggctggggtttcccctagtaacacacacacacacacacacgcacacacacacacacagtgcttntccaaaggctctccctgtccttggcaaggacacattgaactgcgggactcctgccatacatagaaacacacacacacacacacacacacacacggacactcattcacaaaatga

SEQ ID NO: 313 - DNA, 618 bp, Orechromis niloticus
  misc_feature 13, 24, 29, 91, 118, 398, 517, 539, 541, 542, 547, 552,566, 567, 569, 573, 576, 578, 579, 580, 591, 592, 597, 601: n = A,T,C or G
ctctcctttggtnggagatctacnggaangcccttcgtttggggaaagtacccataagcttgatatcgaattcctgcagcccactctgggntagtagaaaagcgctatataagaatgnggggatttacaagtccaatgtgtaaacacatcttcctcattcattattctttgtcaaaccaacaaagtgcagccaaatatttttaattaagcaattgtgtgttccttgaacagcctagattcaaacagatctaatttagcatgtcatgtaaacctattgcttattatcttttattgacaacagtgggatgaacctgggcacgtgcacgcacacacacacacacacacacacacacacagttgtgcaaagaaatttggaaaaacaccatcatcagcacgtncgccgtggctgacgacgcaaatagcagctgagcttgagttggagatcagtgaagccagtctctttgaagatgtattgccaccaggaaaaaaaatttttgcagcttcttccttaaagcanggggggatccactagttctaananncgggncgtcnaccgggggtggganncntccnaantnnncccctatagtnnagtcngtantacgccgccgcttcacc

SEQ ID NO: 314 - DNA, 409 bp, Orechromis niloticus
  misc_feature 257: n = A,T,C or G
cctgactcgtgctcagattaatatcaccattgatcagattggatgggaggtgtcctcacacccgctccaaacaccccccacccccaaacaccacacacacacacacacacacacacacactccctcactctttcattgcagggaatagggctttgcactctgagaattccagtaatgcgcctttccgccatgcagctgtgatttgaagcacacatgcgcatttcatatttatgtgtgtgtgtatgtgttggctttcntgtattttggcatgtgcaaaagtgcctgcaagctcacctgcgtgtctcacctctttggttttattcatgaacacttcttcttcatggttgtttttttggtgctgctcttttgaaaatggtactgcaaaagggcctgcaaatgtgctgtgggg

SEQ ID NO: 315 - DNA, 227 bp, Orechromis niloticus
acaccattatgctataatggtagtgttattggaggaggggatgatgaggaagattaagatgtccatctgttgcccgacagtcagctcagatcagcatgtggacgtactgactgctacgaagccacacacacacacacacacacacacacacacacacacacacacacacacacacacacacacacagtgtgagacagccaacagggttcggcagaatccaacaggga

SEQ ID NO: 316 - DNA, 632 bp, Orechromis niloticus
  misc_feature 6, 12, 28, 36, 490, 504, 510, 548, 551, 569, 573, 576, 577,580, 599, 616, 621, 622, 623, 628, 629: n = A,T,C or G
tgtgtnttgtcngaaccttgggtaccgngccccccntcgaggtcgacggtatcgataagcttgatatcgaattcctgcagcccccccgccccacgccctctgcccaaactgtcgacaccgccgtaaacggggacgctcagctgggttgtctcccacggtgacatggtcacgtggttgcagggcagtcaaatgagactgctgtctgctagcgctcgttacagtcaaaaccacctcatacttgaatcagtaagtcacacacactcacactcacacacacacacacacacacacactctcacacacacacacacacacacacacacacacacacacacacacacacgctcactgtgggtcgcctgctcgcatagatctcttgcggtttctgttttggtcttaaagttagaggaggagaatatgttgagaagttttactggaatgcgtctccttcctgtatggagcgtaaccatctgtgggggggatccacttngtttctagagcggncgccancggggtgggagctttcaatttggccttatagtggagtnggnatttacgcgccgccttanttgnccnnttngttttaaaaacgtttgttnaatttgggaaaaaaccnttggnnngtttnnccc

SEQ ID NO: 317 - DNA, 654 bp, Orechromis niloticus
  misc_feature 2, 3, 4, 5, 6, 7, 10, 13, 19, 24, 28, 30, 31, 33, 36, 38,40, 50, 72, 79, 82, 85, 146, 148, 151, 169, 175, 178, 559: n = A,T,C or G
gnnnnnnggngangttgtnttgtnactngnngngtntnanggaactttcncaagtgcctttccgctttaganctagtgnatncgncaaacggaattctgccacaaacacaggtcaaaccacagtgttcagcatctatatggggtangngantgtcatgttccgcagccngttgangtnaagccaaaacataccgatcatttcagctactgcctgactcgactctcccatgtggtccaaatggctgaccaattaacagcagcttaactcttgagtccaaacagctatctctctttctcacacacacacacacacacacacacacacacacacacacacacacacacacacctgcatgaacacataagcagaaaagcggatgcacacaagcatacaaagtaatggacatgctgatccacaagcacttagacccagtgggctgcaggaattcgatatcaagcttatcgataccgtcgacctcgagggggggcccggtacccagcttttgttccctttagtgagggttaattgcgcgcttggcgtaatcatggtcatagctgnttcctgtgtgaaattgttatccgctacaattccacacaacatacgagccggaagcataaagtgtaaagcctggggtgcctaatgagtgagctaat

SEQ ID NO: 318 - DNA, 792 bp, Orechromis niloticus
  misc_feature 493, 549, 614, 622, 627, 631, 632, 643, 683, 686, 706, 712,719, 734, 737, 740, 757, 758, 759, 763, 785, 788: n = A,T,C or G
tttacctccctttgaaagccccccctcgaggtcgacggtatcgataagcttgatatcgaattcctgcagcccatcgcagctgcctttataagcgatattgcaatgggacatttgcttctcgcacgaacattatccaacgatttccccctgaaggcttggcatgttcaatttgagacgcagcctaaaataccaggcagcgcatctcacaccctggcatgtggtggtgtcactcctgttcatcactcagttcccgttagactcccactggagcgagatgggtttgatgctgtgtgtgtgagtgtgtgtgtgcaagccagttctttcttaatgcttgtttgatggtgcatttgtgcactttgttgtgtatctctatttacttttgtaggcgtgtgtgtgtgtgtgtgtgtgtgtgtgtgtggaatgctgtctgtgtagtaaacagacgcagcgcaagtcgggggggatccactagttctagagcggccgccaccgnggtggagctccaattcgccctatagtgagtcgtattacgcgcgctcactggcccgncgtttaacaacgtcgtgactgggaaaaccctggcgttacccaacttaatcgccttgcagcacatnccctttcnccagntggnntaatagcgaanaaggcccgcaccgaacgccctttcccaacaggttgcgcanccnaatggcgaatgggaaattgnaagccntaaatanttttgttaaaattcnccntanaatttttggtaaaatcnnnttanttttttaacccaataggccganatnggcc

SEQ ID NO: 319 - DNA, 347 bp, Orechromis niloticus
ctgcacacacagcatgtcttaaaaactaatgctgagctccatcagggctggatgccatgagtcttaattaagacagccatgccaagtcaagaagtgaataattctactccccaccaaccaccaccatctccctattacacacacacacacacacacacacacagaagcctaaactctcatttgcagatggatgagcgtgtagatgcagacaaaccacaaagagagactcagattatcagttttaatgggtcagaaaaagcttgctcagtgagtagtgtgtggatgcctgtgtgggcgctgagatagaaaaaccatttagtcacacctacatgagatacctgttgtgt

SEQ ID NO: 320 - DNA, 602 bp, Orechromis niloticus
  misc_feature 3, 6, 9, 20, 27, 35, 77, 105, 106, 549, 551, 578, 588, 592,595: n = A,T,C or G
ttnganctnttggaccttcngaccccntctggagntcgacggtatcgataagcttgatatcgaattcctgcagcccntcagatttacagtctatacttcatattnngatggagtgggaaagaaaagcaggacaggcgcaggacacacacacacgcacacacacgcacgcacacacacacacacacacacaccttatggaagctattagttctgataactattattacttcctaatcatcctagtgtcatgttgaacacttcacaggagtgagaagcttgcaaatctaagcaggcaggtgtcaaagcaaaaaaaaaaagaagaagaagaaaaaaaggaagaaaaaaatgctgtaatgttgcaataatgtgcaggcagctgaggagaaaatgactgcccagatacagactgcagctaagtgattcagaagaagaggctagcgagctttgactgaagcagatggcctctgttataaaaaagtgcattaaacacaaagatcttcttactttacccacagaaagataaagttgatgccgttttatgaaccctgngnggatataaagagcccactattgggaantatggacagngctnctntccatgg

SEQ ID NO: 321 - DNA, 814 bp, Orechromis niloticus
  misc_feature 3, 33, 53, 478, 493, 600, 610, 614, 640, 658, 660, 666,687, 689, 713, 714, 720, 740, 744, 758, 766, 767, 770, 772, 778, 795, 813: n = A,T,C or G
ttnacttttaattcccttttgaacgcggccgcngccgttctagaactagtggntcccccacaaaatctctccagcctgtaagaacaaaacaatgcagtcttatcagggatctcttatttgtttacacaacaaatcagagccgactggtggaaagttcctgcgcttttgtttatctcggctaactgagggcagaagaacaggacggtccagttgattacttgaggtgttttgtgtgtgtgtgtgtgtgtgtgtgtgtgtgtgtgtgtgcgcgtatgtgtgtgctgaactctttacatttcttttctttttcaggaagacttgcagcagttgatactcatgcctctcccaaatgttgccattctgggacctgtgtaaaagcagcaggatttacgctggaattttagttctgctgagccaaataagacaggtcagggtgaagaaggcacagccaaataaaagcctaccacaaaacggaaangttatgacaaatcanactatgaggcaaaaaagaaagctcagcttttttggtttcatggacaaaagaatttatgtggctggaatatgacgagctaaataacataatgttctgccgggtgtgtngtgagtttcntttnatttgagtcgacaagcgccttttgtnactgggaccagttatttngnagaaanaccccattagaacccatgagnanatcaagaaagcattatttgcccanntctgcnatatcttttcccagaacaanacangcatttgcaaaaanattaaccnngcngnaacccnaagtccctgaaaaaatnttttaaaagcgggggctnc

SEQ ID NO: 322 - DNA, 622 bp, Orechromis niloticus
  misc_feature 8, 25, 28, 31, 82, 455, 471, 512, 555, 562, 569, 596, 608,615, 619, 620: n = A,T,C or G
ttgatttnattcccttggaaacccngtnccntttggaggtcgaccgtatcgataagcttgatatcgaattcctgcagccccnttatatgcattcatcccatcacctggaacacacacagaaagctgagtcacactaaaataattactctaattactccatttcatcactagtatttacacaaaccagtgaaacacacacacacacacacacacacacacacacacacacacacacacacacattgtgtcactcttaaagaagtaataatacaccaagaaaaatacctgactgatgtaacaggaatacactctgatcagatgccagactcgttaaactggtttcatgtgtttccttgcggtgacagacgagcattagcaatttacaatttactgttccttgtttgacctttatatttatttgggggatccactagttctagagcggccgccaccgnggtggagcttcaattngccctatagtgagtcgtattacgcgcgctcactggcccgtngttttacaacgtcgtgactgggaaaaccctggcgttacccaantttaatngccttgnagcacattcccctttcgccactggggntaattagcgaanaggcccncccnntc

SEQ ID NO: 323 - DNA, 766 bp, Orechromis niloticus
  misc_feature 2, 3, 4, 5, 7, 12, 24, 660, 723, 726, 752, 753, 760, 766: n = A,T,C or G
tnnnntnttggnctttgaagcccnttccgggccccccctcgaggtcgacggtatcgataagcttgatatcgaattcctgcagcccccgagtgtgtgtgtgtgtgtctgtttgtggagtgtggtagcttttcatctccagaggggaaaacacaggcatgtatttgcttgtttttgttttcccctgcctccctctcgttcaagccctcgtctctatgcctccctcatccccgagcttctattgtgtggctgagatgaaaactaaacagagccgaacctgatctctcctgtctgatgcacacacacacacacacacccacacagacacacacaaagatgtgcatgcctgcagacgctctctgtgtggtcctgcacgtctttagatcttcacacagttgccgccaaagtcttctagagttgtgtgcttatcactgttctctttctgcgcattatactacgagttttcagcagcagtgatttcaccaagtcgttttgttcttttcgctttttcctccgttacttcaaacagaagtagacaggacagaaatgtctcacaatgaaataaacactgaaatactggtagagcaagagcgaagatgagtctgaaagatctcgatcgattcatgtgaagtaggactgctgatgagcctagtagaaggaccntggatattgggcctgatgaaacgggaggtgatagcgggaggaagggtgcattgatctgcccancantgacaactgacagacaaacgcagggnnttttganacgcan

SEQ ID NO: 324 - DNA, 315 bp, Orechromis niloticus
actgacaaacacacttgcagtgagacacagtgaaagtcaatactcttcgccttcttcccttctcttcctttgactccccgtctccttcactcctctcaccaaacatccgcatctattcctgtcggacctcctctcaaaaccacagaatacactcctcctcacacagacacacagacacacagacacacacacacatacacacactgactaaccacagaggcagaggcatgatggagccacactaacaaagcagccaccgggaacacatgatgctgtgactcaacatcatccgtgcctgcagaggacatcaaaaat

SEQ ID NO: 325 - DNA, 810 bp, Orechromis niloticus
  misc_feature 3, 9, 18, 20, 32, 35, 619, 658, 704, 706, 723, 740, 747,755, 758, 761, 791, 795, 810: n = A,T,C or G
aantttgantgccctttnancgcggccgtggncgntctagaactagtggatcccccacgcaccagcagcaatactcaaacgtcccgtatcttccgaggaaaggggtgtgcatgtgggagtgtgtgtgtgtgtgtgtgtatgtgtgtgtgtgtgcttggcagtgacgaaagcgcagtgataagaacacgtccctttcacctaagtcacaaaatattaccatgtgttgcaactccatatatactcttttcttcttttatcattcatttgttacacaaatctgctatctgtgtccctgtgtgcagcctacaaaaaacatgtttcagctcctttttttttaattctgtgggctgcaggaattcgatatcaagcttatcgataccgtcgacctcgagggggggcccggtacccagcttttgttccctttagtgagggttaattgcgcgcttgggcgtaatcatggtcatagctgtttcctgtgtgaaattgttatccgctcacaattccacacaacatacgagccggaagcataaagtgtaaagcctggggtgcctaatgaagtgagctaactcacattaattgcgttgcgctcactggccgctttccagtcgggaaacctgtngtgccagcttgcattaatggaatcgggcaacgccccggngagaaggccggtttgccgtatttgggccgctttttccgctttcttngnttactgacttcggttgngcttcgggtcgttcggntgccggnaaccggtnttnggnttaacttcaaagggcgggaaattccggttntccncagaattcagggggn

SEQ ID NO: 326 - DNA, 834 bp, Orechromis niloticus
  misc_feature 7, 8, 9, 10, 11, 14, 16, 17, 18, 19, 20, 21, 23, 24, 31,45, 46, 47, 68, 79, 84, 85, 86, 453, 467, 470, 473, 479, 489, 505, 513, 514, 517, 518, 519, 520, 521, 522, 525, 528, 530, 532, 544, 545, 546, 547, 555, 556, 557, 558, 559, 560: n = A,T,C or G
  misc_feature 579, 592, 596, 602, 605, 608, 625, 630, 631, 632, 634, 637,656, 672, 675, 676, 678, 679, 681, 687, 689, 692, 695, 696, 700, 701, 708, 710, 712, 717, 718, 719, 728, 729, 730, 731,732, 739, 740, 741, 743, 744, 745, 746, 748, 755, 756: n = A,T,C or G
  misc_feature 757, 758, 759, 765, 766, 768, 769, 770, 771, 772, 773, 788,789, 790, 791, 792, 799, 800, 802, 803, 813, 814, 815, 819, 825, 829, 830, 831: n = A,T,C or G
gagaggnnnnnggngnnnnnnannttatctntgacatatgatctnnntgaaacccccctcgagtttanggaatcgatcncttgnnncgaattcctgcagcccacagttgctcctctgcattgtcccgaatggaaaccaagacagtagcagtctttagtttataggattttcctgacgttcaaggtgtcaatatgacagactgatgataaacagaaaaatatgtagcattttcttgtccgcagccggtttccagtgagaagacaatgacaacatgacgagctgattgtaagaggttagctcagcaagcctccacctgagagagcttagttgtttcagcaccagatgcccccccccccccccccccacacacacacacacacacacacacacacacaccggcactgtgagtgaccaaatgaaaaagggtatgaatcaaagctgcggcgtcctcgngggggatccactanttntanagcggncgccaccgcngtggagctccaattcnccctatanngannnnnnatnacncncnctcactggcccnnnntttacaannnnnngactgggaaaaaccttggngtaccccaacttnaacncccttncanaanaatccccttttcccaanttggnnnantanccaaaaaggccccaacccnatcgccctttccaaanaanntnncncaaccntnaantgnnaaannggaaaantntnaaccnnnaaaaatttnnnnntaaaaannncnnnnanaaaattnnnnntaaaannannnnnnattttttaacccaannnnnccaaatnngnnaaaaaccctnnnaaancaaaanaaannnccc

SEQ ID NO: 327 - DNA, 619 bp, Orechromis niloticus
  misc_feature 7, 9, 13, 20, 586, 619: n = A,T,C or G
ttgaatncnttgngtaccgngccccccctcgaggtcgacggtatcgataagcttgatatcgaattcctgcagcccccgttcactatctaggacaccagcggcggcgacttgtagtgtaactttgcacacaaacagtgttttctcactccccccagatctctttccatctctcacacacacacacacacacacacacacacacacacaggaaagggaaagcagcgtgtcctgcaaccatcagcactttcaccggtgtcctcgccagaccgtccccgtctcctctcatgtccttaatgactctcccacttggcgtcctctctccctcacctccctaccgcctttcctcctgcaccgtcaatgccctccatcctactccagcacccagttttgggggatccactagttctagagcggccgccacgcggtggagctccaattcgcctatagtgagtccgtattacgcgcgctcactggcccgtcgttttacaacggtcgtgactgggaaaaccctgggcgttacccaacttaatcgccttgcagcacattcccctttcgcagcttgggcgtaatagcgaaagagcccgancccgatcggcctttccaaacaagtgcgcaagcn

SEQ ID NO: 328 - DNA, 794 bp, Orechromis niloticus
  misc_feature 3, 9, 13, 25, 34, 631, 642, 646, 675, 681, 683, 688, 712,733, 763, 782, 786, 790, 792: n = A,T,C or G
tgntttgantgcntttgaccgcggnggcggccgntctagaactagtggatcccccaaagctttggaggttcctcaagccttaaaaaaagccaccagttttcactctaaagatgcttctcctactaccgctgttctgtccaggtcaaggaagtttgagtcccacctctcccatcgtcctggagaagccagagagcctcaacactgtcaccttcagcgaggactctgtgtaagcgcgcacatgagtaaacacacacacacacacacacacacacacacacacatacacacaaaaatcagctattaataaaccgtctgcatgcttcataattacagacaatgctcagagaagtgtgtgatgaacaactacttcggcatcgggggctgcaggaattcgatatcaagcttatcgataccgtcgacctcgagggggggcccggtacccagcttttgttccctttagtgagggttaattgcgcgcttgggcgtaatcatggtcatagctgtttcctgtgtgaaattgttatccgctcacaattccacacaacatacgagccggaagcataaagtgtaaagcctgggggtgcctaatgagtgagctaactcacattaatttggcgttgcgctcactggnccgcttttcangtcngggaaaccctggtcgtgcccagctggcanttaaangnaattnggccaacgcccggggagaaggccngtttggcgtatttgggcgctntttccgctttcttgggttaactgacttggntggcttggggccgttcggnttgngggnancc

SEQ ID NO: 329 - DNA, 340 bp, Orechromis niloticus
gtttgtgagtctgtgcagaaatggcagagcaagcgtgtcagatgaagaaaaatgctgttgtagaagtaaatgagccaaagtcctgaaagacaggaggtgtggagagttattttcagaaaggtcatagactctgtgatccattaatgttgacaccgataaagttccctactgaagcatgcatatagtccacacactgctacatctggctccagtaactttctgctccactgactgtatgtccacacacacacacacacacacacacacacacacacacacacacacacacacacacacgcagtatcatactcaggtgtgggcggaggacctgtcctcttgg

SEQ ID NO: 330 - DNA, 523 bp, Orechromis niloticus
  misc_feature 400, 418, 419, 511, 523: n = A,T,C or G
tgattgcactgctggatgttggtatccttgctgtgatactgtaagtcatatgagggtggtctctctctctctgatatttgctataacagacaaactatgaccccccttgtttgtgtttttgaagccagtgatttaatgacctcctgctatctagactgaaaagagtgaaagttattctggacaaaagtgtaaacttgattagaaatttttttcaactgtcttataattattggctcactcaatttgtattttattttatttgtattatttgttgcagacataaaacacacacacacacacacacacacacacacacacacacacacacacacacacacactattgtttctctaatggcaattaggcaaaggttcatctggtagggtaggttgaaattaanaagtggggggatccactnngtctagagcggccgccaccgcggtgggagctccaattcgccctatagtgagtcgtattacgcgcgctcactggccgtcgtttacaacgtcgngactggggaaan

SEQ ID NO: 331 - DNA, 806 bp, Orechromis niloticus
  misc_feature 3, 4, 5, 12, 13, 14, 17, 30, 39, 463, 515, 532, 548, 616,642, 649, 650, 658, 663, 665, 680, 694, 712, 725, 730, 733, 748, 749, 752, 757, 761, 768, 771, 774, 775, 782, 785, 788,804, 806: n = A,T,C or G
tgnnntttgaannnctntgaatggcccttnccgcggtgncggccgctctagaactagtggatcccccacatgtagttagtttccttttacactgctccgtgtgtgtgtgtgtgtgtgtgtgtgtgtgcgtgtgcagtgatgtgtagtgcttttgtcctgtccatggtcctactgtgaaacagactctttaacttttcaagcagtgaatgtttttttgactcaaggttgtgtgactttcacctgatgtatgctgttagatttcccactcttcagtaacccgtggacttgaagcattatcaatgataaggaataattcaagttattccaggtgtccccaacctcaaagggtcactatagttaatcaacagtatagaaaaaaaacacatcagtgggctgcaggaattcgatatcaagcttatcgataccgtcgacctcgagggggggcccggtacccagcttttgntccctttagtgagggttaattgcgcgcttggcgtaatcatggtcatagctgnttcctgtgtgaaaatgntatccgctcacaattncacacacatacgaaccggaagcataaagtgtaaaacctggggtgcctaaagagggagctaactcacantaaatgccgttgcgctcactggcccnttttcanncgggaaanctgtngngccactgcattaatnaatcggccaacgcnccgggaaaagccgttgcntatttgggcgctnttccnttncttggtaatgactcnnttngcttnggcngttcggnttnggnnaaccggnatnagnttactcaaaggggggnan

SEQ ID NO: 332 - DNA, 608 bp, Orechromis niloticus
  misc_feature 2, 9, 13, 15, 21, 39, 43, 91, 115, 551, 562, 569, 590, 596,601, 603, 607: n = A,T,C or G
tntatttgnctcncngaactncttggaaaccccgccccntttngaggtcgaccgtatcgataagcttgatatcgaattcctgcagcccacncttgcctattcaggctcttctttngctgtaacaccaccaaccccctcacactgacacacacacacacacacacacactcccttcctcgctatctggcagtcttgttgcctggagggagttcattctgccctccttctctcctcctctcctccacctctttccttgtgtatcggcagtgagagcgagagagagagagagagagagaggggagggtgagaaaatgagagagcgagagagagagtggcagcagtagcggaggaagcagagctgtctctcttctgatcatctttcttggatagagggataaaaggcagtcctaggaatcagtcgttgctcttgtctgcaggatttacccagcctgagtttattctccctccttcctcttttcacctcttcttgacactggaccgctagcttttacatctctctctccggggggggatccactagttctagagcngccgccaccgnggggggngctccaattcgcctatagggngtccgnattancncccnc

SEQ ID NO: 333 - DNA, 325 bp, Orechromis niloticus
tgtgccatcctctacagcgagacaatttcacagtgtccaaagccgattctctgcgcttgttaattgaatcggatttcttatagtttaaaatccacacacacacacacacacacacacacacacacacacacacacacacagactcatgtagctacagcccaaactgtataaggggtttatctagctctgtaaagccaaagcaggagatataaagacacacacagagccacagagagtattttaccggcgtgtttgaacgtttccaaatctcagaataaaatgtcttcacctgctgaggtgtgtgtggctgtctcagtgtgtggga

SEQ ID NO: 334 - DNA, 621 bp, Orechromis niloticus
  misc_feature 3, 7, 8, 9, 13, 14, 24, 39, 621: n = A,T,C or G
tgngttnnnctcnngattccttgngtaccgcgccccccntcgaggtcgacggtatcgataagcttgatatcgaattcctgcagccccctgtcttcatggcacacacacacacagataatgtgccctttactgcaagatgtcaaatgctaaagttcctccttaaacagatattacaggaaaaagagtttgtattttgttgtaagttaacggttgtcacacaatcagcttataaaagtgaacactattcctcactctcacacgcacacacagggcagcacaaatgaacaactgtacggtgcaggattattacagtataagttttagaagcgatgactgtgacattcctcctcactgctgagttcatgactaagacggattaactggacttccatttctgcttatcatatggatgggattaacctgtgctatggatctcacacacacacacacacacacacacacacacacacacacacacacacacatatatacaggaacagctcagcacagaacacacactcacactccctgtagtagggggggatccactagttctagagcggccgccaccgcggtggagcttcaattcgccctatagtgaggtcgtattacgcgcgctcn

SEQ ID NO: 335 - DNA, 606 bp, Orechromis niloticus
  misc_feature 20, 383, 436, 437, 496, 497, 508, 512, 513, 517, 551, 558,569, 587, 605, 606: n = A,T,C or G
gtttgaaccttgggtaccgngccccccctcgaggtcgacggtatcgataagcttgatatcgaattcctgcagccctactgcgatcgactacaggcggcagtgcgacttcagcaccacggacagtgccatgaacacagcaaggcaaggcactgactgcgatacctgactgtatcaaattactaaccagcagggcataaaagaacctctgtgtgtgtgtgtgtgtgtgtgtgtgtgtgtgtgtgtgtgtgtgtgtgtgtgtgtgtgtgtgtgtgtgtcctaaaggcagtgacaggaacagggagagagaaagtagtccagtatcacaggctgggggggatccactagttctagagcggccgccaccgcggtggagctccaattcnccctatagtgagtcgtattacgcgcgctcactggccgtcgttttacaacgtcnngactgggaaaaccctggcgttacccaacttaattcgccttgcagcacatccccctttcnncagctggcgtnatanngaanaggcccgcaccgatcgccctttccaacagttgcncaacctnaatggccgaanggaaatttgtaagccttnatattttggttaaaattnn

SEQ ID NO: 336 - DNA, 316 bp, Orechromis niloticus
  misc_feature 36: n = A,T,C or G
gaacagaagaacacaccctgccagcagagagctcangttcctacagactgacgcagtgtcactcatccactgtgcacacacacacacaccgacacacacccagcctccttttgcatgccgtgtttctagagatatgcattcaacatttcatgtacacacataaacaagtcgttgacacacacacacacacacacacacactctcatgtatacagtgagatacactctttctcttttgaattagtgatgagggactgagctgctgaattatgcaggagacacaaagagagaaagttgctgaaactacacatggtttt

SEQ ID NO: 337 - DNA, 802 bp, Orechromis niloticus
  misc_feature 17, 566, 624, 627, 656, 682, 693, 737, 742, 751, 758, 775,776, 786, 790, 793: n = A,T,C or G
tttgaatgcccttccangccccccctcgaggtcgacggtatcgataagcttgatatcgaattcctgcagcccacattatccaatgcacaggtgtggaaaaagagcagcaatgtgcacagacactgatgatgttacactgtcagtaaaaacatcagtaggcttaactctgaaggaacactgacacagcaaaattgcatcagtgttaatcccatcttaatcacaacataatactaatgatggtgcaggcttacacacacacacacacacacacacacacacacacacacacacacacacacacacacacacacacacacactcttttaatgccatcagtggttgctgcacatcttctgcaggtaaaatttcttgttcttctctgaaacggctgtagcagaatttatttatttgtagctgctgtgatagctttacagcaatcacagcagcagacagtgactccactgctgttcgtgcagatatgcaaaactaaagcctcggtcaacaggcacatgtgaacacctgctcttagctcagctctgctctctgctgcatgtgaagggtcagtnggtgtgaacatgtggtgcttgtggggggggggggatccactattttctagaagcgggncgnccccgggggtggagctccaattcgccctntaggggagttcgtattacgcgcgctnactgggcgggngtttacaacggtcgtgactgggaaaaccttggcgttaccccaanttaantcgcctttnagcaaantccccctttttgccagnntggggtaatngcgnaanaggccccct

SEQ ID NO: 338 - DNA, 584 bp, Orechromis niloticus
  misc_feature 36, 490, 528, 546, 562, 578, 583, 584: n = A,T,C or G
acctggcaaacaacacactaaggttggacaactggncgaatttatcgaccatcgatcatagactgagcctttcaccgattgtttttacaagagcgatttattcattttcccattagtaagtctgctaataatgttggttgaagctaagagaagcagtccacacacacacacacacacacacacacacacacacacacacacacacacacccccttttccagctgtgagcaaatgcatgctcttcagagtgcgacaaatgactccttttccatggtatgaaacaacatcatttccttgacagatatttagaatagccagagtgcacagtgtccacctggggctgtctttttcatatttaaccattttagtcaaatcactttggatattctgctggtgaaaagcttttccggagcttgtcaatcaaaaagtcaccaaaagtcacctgcatgaatatattgctatcgtcatttattgggactgatgaatgtcngtttggaaaaaatttttagtttttcaccccaacctttnctaccgcacccaaagttntggtatttagtaattntaaaacctctttaccnaggann

SEQ ID NO: 339 - DNA, 351 bp, Orechromis niloticus
atccattgtaaactttctataaactctgtaaacattgattcaaatataggctgtaatggtaagctgcgttgtctgtagcagcggcattcacagcatctctagcataagcatgaagcttagtcacataccagtaatgcatgtaggctgcataatggcgtcagcatatgttatgcttccacatccttgaacatcctatacacacacacacacacacacacacacacacacaacacacacacacacacacacacacaccccaacacacacacacacacacaagactactcagcagcacatgtgctgccacttttcccacagggctctgtagaaataactacaaacacatattgt

SEQ ID NO: 340 - DNA, 794 bp, Orechromis niloticus
  misc_feature 5, 6, 7, 8, 9, 11, 15, 25, 34, 598, 658, 669, 776, 786, 794: n = A,T,C or G
gtttnnnnntntgtnaatcttttgnccgtggccncggcccgctctagaactagtggatcccccccctgctggacacatagatgaagtctcaaacatttatttgcaagggtgggaagttgagtgctgaattatgggtaatgagtttggtccaaaatggatgcacagtgtggtgtaacatctaaatctccacgcagtccctggctctctctctctcatttagctgtggtgtagaacacagctttgaatttcatttcaggctgtggaattatttacagacaacacacttcctcatagttgtgattgacattaaagaaaatcaatcagtgtaatgacggggagttttaatctactgagggcagcgatggatctgaagcagctgctcacacacacacacacacacacacacacacacacacacacacacagtcagtaaatggttattttaatacctgttgatctgtaattttgaacctgctccggagcagatttgtggagcaattacaccgtccatggggctgcaggaattcgatatcaagcttatcgataccgtcgacctcgagggggggcccggtacccagcttttggtccctttagtganggttaattgcgcgcttggcgtaatcatggtcatagctggttcctgggtgaaattggtatncgtcacaattncccacaacatcgaagccggaagcataaagtgtaaagcctggggtgcctaatgaggtgagctaacttacattaattgcgttgcgctactggcccgttttccaatcggnaacctgtcgngccacttn

SEQ ID NO: 341 - DNA, 789 bp, Orechromis niloticus
  misc_feature 2, 3, 4, 5, 16, 19, 25, 33, 40, 653, 662, 665, 667, 683,705, 712, 736, 740, 773: n = A,T,C or G
tnnnntttttgactangtnattgcnctttgaangcggccncggccgctctagaactagtggatcccccatcgcgtcagcaggacaggcagccatttctggagctcgtcctatctttagaacagaaactgtgctgataacagagcttccacagcagctaaatacacagcttatcccacaacacacacacacacacacacacacacacacacactagtgttacatgtgtaggctgttttttccccacatgcaaatagcgggctggtttcgggaggcgattcactttcaacatcatttagctgcctgactgaccagtgagggggctgcaggaattcgatatcaagcttatcgataccgtcgacctcgagggggggcccggtacccagcttttgttccctttagtgagggttaattgcgcgcttggcgtaatcatggtcatagctgtttcctgtgtgaaattgttatccgctcacaattccacacaacatacgagccggaagcataaagtgtaaagcctggggtgcctaatgagtgagctaactcacattaattgcgttgcgctcactgcccgctttcagtcgggaaacctgtcgtgccagctgcattaatgaatcggccaacgcgcggggagaggcggtttgcgtattgggcgctntttcgcttnctngnttaattgactcgctgngctcggccgttcggctgcggcnagcggtntagcttactcaaaggcgggaaacngttnttcacagaatcaggggataccccaggaaagacnttttgagccaaaggcc

SEQ ID NO: 342 - DNA, 345 bp, Orechromis niloticus
tatttacacagccaggagacaaatagaaacatcatcatttatcagttttctggtctaataagaaacacacacacacacacacacacacacacacacacacacacacacacacacacacacacacacacacagagtaatggctttaaaaaagttcttaaatctgaatagtatgttggagatgtatgtaaatgaggcaacttggactaacagtgcaaaacaggacagtcatttctgtggaaataagcttcagggatttccttgctggtcctcggatgggctaaaaatcagcttgcgtgtgactttaatggagtgcagctctcacacagtaaagccccgaagcagtaa

SEQ ID NO: 343 - DNA, 441 bp, Orechromis niloticus
  misc_feature 285: n = A,T,C or G
gccatcccgcctccacacacacacacacacacacatacacacacacacacacacacacacacacacacacacacatgctgcgaggtaacggcagacaggcgcgtgactcattaggcattcgtcccccagggagatcgctgggggggcgcgtgcgagggagagagagcgccgcagctgcaggaatgtcacgggcggcttctgctctgtgtgtgtgtgtgtgtgtgtgtgtgtgtgtgtgcttgctaatgctggttggagccaacggcggggcactgcacctttcangaaataacgcatggagaaaggggaggaaaaaaagggaaaaaaacatacttattagttctcttttccaccaagtgcttatttaaaagtctaaaatgaatttagagagaaaacattagattgccttataatttctgctttaattagaatgcttttgct

SEQ ID NO: 344 - DNA, 653 bp, Orechromis niloticus
  misc_feature 33, 82, 111, 596, 624: n = A,T,C or G
tttgatgcctttggaaccaccgcggtggtttgncgctctagacctagtggatcccccccatggacaccagaacaggaaagtnatgaacacacacacacatctacacacacnctgactcagcatgaagtgatacacacacatgaacacatgtgaactcgttgactgagtgagaaatgacacacacacctacaccgaaatggtgattcattgagaagtgatccacacacaaaatacacatgcagacgctcgtgcaatgaagagtaatgcacacacacatgctcgtgcaatgaagaatgctttgctaacaaatgcttatgctgatatgcaaaatgctgcatacacacacacacacacacacacacacacacacagactctgttacaagaagccattgattacacagaacgcattttatgtcatccagagggcacattatgtgggctgcaggaattcgatatcaagcttatcgataccgtcgacctcgagggggggccccggtacccagctttttgttcccttttagtggaggggttaattgcgcgcttgggcgtaatcatggtcataagctgtttcccttgggtgaaaattggttattnccgcttcacaatttccacacaacatacngagcccggaagcatttaaaaggtgtaaaa

SEQ ID NO: 345 - DNA, 284 bp, Orechromis niloticus
atctggaccaacaaccatattcaaagtcaatgaaatcaactttcttcctcattctgatgcaactctcagtttgaagttcagcatgttgtctggatcttgtctagatgactacggaaagtgtgaaaagtatacctaataaagtgtctggtgatgatttgcacacacacacacacacacacacacacacacacacacacacacacacacacacacacacacacacacacacacacacacacacacacaagtgatcagtggacctaagaacagaccacagcaacaaa

SEQ ID NO: 346 - DNA, 609 bp, Orechromis niloticus
  misc_feature 3, 24, 27, 33, 49, 73, 357, 570, 593, 608: n = A,T,C or G
atnttgtaacatgaaaagatttanaangaactnccccgcgtacttgggnaaaaacccccaggggatccccccnggagtcagttactgcacagttttttggcaagttgagaggctactgttaaacctaaccacacacacaccacacacacacacacacgcacacgcacacacacacacacacacacacaccacacacaataagagcagaagcatgtgttcctgagcattgcagatatgtactggtaaacatgccaactaaggttgtgggttgttttcacattggctctgtgtgcatgaaggcgttttaatgacagcttttgggctgcaggaattcgatatcaagcttatcgataccgncgacctcgagggggggcccggtacccagcttttgttccctttagtgagggttaattgcgcgcttggcgtaatcatggtcatagctgtttcctgtgtgaaattgttatccgctcacaattccacacaacatacgagccggaagcataaagttaaagcctggggtgcctaatgagtgagctaactcacattaattgcgttgcgctcactgcccgntttccagtcgggaaacctggcgngccagctgcattaana

SEQ ID NO: 347 - DNA, 617 bp, Orechromis niloticus
  misc_feature 6, 7, 9, 11, 12, 17, 20, 23, 27, 28, 29, 31, 32, 36, 44: n = A,T,C or G
agggtnntnannttatnttntanttgnnntnnaatntgatgccnccccctttcgaggtcgacggtatcgataagcttgatatcgaattcctgcagcccccgacattgtcggtggacattaacgccacactgtgcagtagtgaccttgaattaatttacagcacgatgctgctgagccaagacctcattcacacacacacacacacacacacacacacacacacaaaaacgcaaaacatcggcagcattgtttccttcagaaaatgaggtcacgttaaactacttccagtgccatatatgggcaaaaacatcatccaatacacacacagcagagtttacagaacacaccagtttgttattcaaataaaagatcaactgtgataagtcctaagtgtctaatttattagaaatgttcaaaacggagacaattaaatcgcatcttttgtgtttacaatgtgacaacacaaacaccacttttgtctgcgtttgcctggtcctttaggctcaggcagcagcattatgttggtcttgtttgcttctttcagctttgcttccccagtcttatccagtccatcatcctttttccaacacgagccatctccctagcagccaagccag

SEQ ID NO: 348 - DNA, 588 bp, Orechromis niloticus
  misc_feature 102, 469, 472, 492, 498, 507, 517, 526, 531, 547, 558, 561,582, 585: n = A,T,C or G
ttgatcccttgctcccgggtggcggccgctctagaactagtggatccccccccacctcggctcagcttagcccggcgcactgcttttagcacacggcatttncacgtgcatgtccctgccacataccatggcgtgcacgtcaacacaccagcgcacacacacactctacatggcagtgttatttactgagatgtatatatacattcacaggactgattacagccgctaagaagtgtatctcaaactgtaaataattcaacatagacaagcagcttggctctgacctcacacttgactcagcagaaacacacacacacacacacacacaagcaaactgtaggttcagctaatggatgtttacaactgttcatttgtggattagctgcttgtgcatgcagcattttcgtctgcaagaaggagaaaagtgggctgcaggaattcgatatcaaagcttatcgataccgtcganctngaaagggggggcccgggtancccagntttttggtnccctttaagngaggggttnaattnccccgctttggccgtnattcaatgggncantaggcttggtttccctggggnggnaag

SEQ ID NO: 349 - DNA, 610 bp, Orechromis niloticus
  misc_feature 3, 5, 9, 11, 14, 15, 20, 28, 39, 59, 62, 101, 102, 130: n = A,T,C or G
ttntntttntntcnngtagnttctcacncgattggcccntcctttttgggttaaggtanccnataagcttgatatcgaattcctgcagcccaaatcttacnntgagatcatcccataaaaaggctttctntctctctctctctctccctctctctctgtcacacacacacacacacacacacacacacacacacacacacacacaagatccaatagttgggttgcagtcacgtggttctgatgacgtgcggaggcagcgcgatttttgagtggagggcggaagtaaacatggaggacactgtggagagtcaggagagcagctattgtgcaactttagaccccgtttctcgggagagatataaacagatagttaaaaaatatatcggacgtgatccgtattctttgaaaatgtccgaatacaccacagcagtaaaggatttgcctactatcgaggctgtggatgggggatccactagttctagagcggccgccaccgcggtggagctccaattcgccctatagtgagtcgtattacgcgcgctcactggcccgtcgttttacaacgtcgtgactgggaaaaccctggcgttacccaacttaatcgccttgc

SEQ ID NO: 350 - DNA, 537 bp, Orechromis niloticus
  misc_feature 3, 7, 17, 20, 21, 22, 23, 35, 40, 83, 86, 456, 463, 471,489, 510, 533: n = A,T,C or G
ttntatnttcatgtgantcnnnntctcccccgcgntggcngccgctctagaactagtggatcccccaccagcagaataaggtnggntcaccatacagtcttagtgacagctgagtattgaaaaggctgcttgcagaagagaggtgcctctgtttgtgtgtgtgtgtgtgtgtgtgtgtgtgtttgtgtttgtgtgcctatgagaagaagagagagacaagacacaacaaaaaagaataggagatagtctgttgccctcagacacatctttgcactccaaggcatcacactgggtgtgtgcgtttgtgaggttctgcatattttgagcactttttgagcaagatttaattaaattaaattaaatttaattcaattttatttatatagcgccaaatcccaacaacagtcacttcaaggcgcgttatattgtaaggtagaccctacagtaatacatacnaagaaanacccaacnatcatatgaccctgagcnggcactttggttgacagtggnaaggaaaaactctccttcaacangaaa

SEQ ID NO: 351 - DNA, 836 bp, Orechromis niloticus
  misc_feature 5, 6, 7, 8, 15, 21, 30, 37, 44, 46, 513, 580, 645, 659,660, 665, 666, 668, 670, 677, 696, 705, 768, 769, 774, 787, 789, 795, 803, 806, 809, 815, 827, 833: n = A,T,C or G
ttgtnnnncctcgtnaatgcncttttgaangcggccncggccgntntagaactagtggatcccccccaattgatgaagaggtaacaccagagtagaggctattacagaagtcgaggcgagatgagatgaagccatgggtcgctgtgatatatgccacacacacacacacacaaacacacacacacacacacacacacacacacacacacacacacacaccgttattgctcacgatcacgttttttatttataataacaatgcaccgtgacagctcgtcccggtccagccagcctcccactcgactctgccgtcactatatagacacacagaaggaagacactcatgacacaatcgccaccacctgtggctcacctgcctcccggtgggctgcaggaattcgatatcaagcttatcgataccgtcgacctcgagggggggcccggtacccagcttttgttccctttagtgagggttaattgcgcgcttggcgtaatcatggtcatagctggttnctgtgtgaaattgttatccgctcacaatttcacacaacatacgagccggaagcataaagtgtaaagnctggggtggcctaatgagtgagcttactacattaattggcgttgcgctcactggccgcttttcangtcggggaaacttnntcgtnncnangttgcanttattgaattcggccaacnccccggganaggccggtttccgttttgggcgctttttccgcttcttggttaattgacttgcttgcgcttggnnccttncggttggggcgancnggtatnaagcttanttnaanggcggnaataccgggttntcacanaat

SEQ ID NO: 352 - DNA, 562 bp, Orechromis niloticus
  misc_feature 405, 435, 465, 485, 503, 532: n = A,T,C or G
atattgtgtgagggggtgtcttcctggtgtcatgctgtgctggcaatattgcaaaagacatgctcaggtgtgcgttcaagtgtgtgtgtgtgtgtgtgtgcgtgtgtgtgtgtaagacagagagagataaggatctttgtctatttccgcacctgcttaaagagttgtgggaccgtgatctgattggcgtctcctgaacagggacttctggtatggacggaggctcagtgaccggcgtctgttcctgtgataacaggggaggggaaatgtgaaacaccagcatactgaatgacaagagagtgggggatccactagttctagagcggccgccaccgcggtggagctccaattcgccctatagtgagtcgtattacgcgcgctcactggccgtcgttttacaacgtncgtgactgggaaaaccctggcgttacccancttaatcgccttgcagcacattcccctttngccagctggcgttaatagcnaaaaagccccgcaccggntcgccctttccaacagtttctccatcctnaaatggccgaatggaaatttgtaagccgtt

SEQ ID NO: 353 - DNA, 611 bp, Orechromis niloticus
  misc_feature 3, 4, 5, 6, 8, 9, 10, 11, 12, 15, 16, 20, 22, 29, 31, 33,40, 43, 49, 63, 67, 71, 91, 108, 109, 135, 347, 534, 546, 554, 578, 582, 595, 608, 611: n = A,T,C or G
ggnnnngnnnnntanntttntnttcctantntngaagatntanaggganccctcgtttctttngggnaacnaccctatcgataagctggangtcgaattcctgcagcnnctttgtgtgtggtctgagtggttccngggggggaggagtgaaccagtctcagacacttcagactgcagtctctctctctctctcacacacacacacacacacacacacacacacacacacacacacacacacacacacacacaagcagggatggacgcacgcacacacatgcacacacacgcacacacacacacacacacacacatgcacacagtgatgagtgcaaagagggagaggnccaataaacaagggggggatccactagttctagagcggccgccaccgcggtggagctccaattcgccctatagtgagtcgtattacgcgcgctcactggccgtcgttttacaacgtcgtgactgggaaaaccctggcgttacccaacttaatcgccttgcagcacatccccctttcgccagctggcngtaatagcgaanaggcccgnaccgatcggcctttccaaacaagntgcncaacctgaatggncaatggaaaatgnaan

SEQ ID NO: 354 - DNA, 304 bp, Orechromis niloticus
  misc_feature 304: n = A,T,C or G
tggatgtactgtcctatgtcagtgaaggactctggcaacccactaatgcagctggatttgcattgagtgaaatgaagcgaaagttttaaatggcatcagtcttgctattaaagcaaagcaaaacatcagacaaacagggaggagcagctctctcctctatccgtgtgtgtgtgtgtgtgtgtgtgtgtgtgtgtgtgtgtgtgtgtgtgtgtgtatgtgtgtgtagtaactgggggagtgctgtcccttgcctctgctcagtgtgtgcagcagctgcagctttcagcctcggtctatactgtan

SEQ ID NO: 355 - DNA, 180 bp, Orechromis niloticus
aggcttgaatgatggtcttaaagggggcagtatataacctgtgtgtctttatcattatatgtgtgtgtgtgtgtgtgtgtgtgtgtttcctggagagcaaaggctgtgaatgaactcctaaatcacactattgatcagcccttcctcccagacacacgctgggatcgagggcagttaaat

SEQ ID NO: 356 - DNA, 660 bp, Orechromis niloticus
  misc_feature 2, 3, 4, 5, 7, 8, 10, 11, 12, 15, 16, 20, 21, 22, 23, 24,25, 38, 652, 658: n = A,T,C or G
gnnnntnntnnnttnnttgnnnnnntccgttgggagcnccccgcggtggcggccgctctagaactagtggatcccccacaatgatagcagtggaattatctaacacacagatacacacgtaacagccacagacccctaacatgcttatctaagtggcgatattacagtaatacattataatcacactctttgatcactctatctgggacacctgctgcactttgggggatgcagaactgctttgtctgcagatatatacacataacacacacacacacacacacacacacacacacacacacacacacacacacacacacacacactctatatgacaaccaaattttcccctcacaaccgtaatggaacaaacggcagagctattagattagcaggacatgtaacaacacaataaactgggagcacacctgaggctggatgcagtgtaagtgggctgcaggaattcgatatcaagcttatcgataccgtcgacctcgagggggggcccggtacccagcttttgttccctttagtgaggggttaattgcgccctttgggcgtaatcatggcatagctgtttcctgtgtgaaaattgttatccgctcacaatttcacacaacatacgagccggaagcttaaagtgtaaagcctngggtgnct

SEQ ID NO: 357 - DNA, 545 bp, Orechromis niloticus
  misc_feature 2: n = A,T,C or G
tntttgactccttggaactccccgcggtggcggccgctctagaactagtggatcccccacttgagtcaattccctgtgaattaacataaatgtggtgattcgccaacataagcagctgtgttatgactgatgtgaatacagtggaagggtctggaaaagcagatgcacagctatgagctgctgcattgctgctagtcaggagctgtcaggaaaagactagaagcaggtcccagatgggaacgcatgtgaacacaaagtagagctttgcatgctcagcaaaccttcttaagataaatacaattgtgtgtgtgtgtgtgtgtgtgtgtttgagtgctggaggggtctttcacagttccttggaataagcctgttcttgcgttgtgagggtgcagctaaacataaatcatgcattaggctttcttagaggagaacttggtttcgaacatatcagcttgaatttcggacccgcgtgggctgcagggaattcgatatcaagcttatcgatacccgtcgacctcgagggggggccccgggtcccagctttt

SEQ ID NO: 358 - DNA, 630 bp, Orechromis niloticus
  misc_feature 3, 4, 561, 615: n = A,T,C or G
tgnntttgacaaccttgggtaccgggccccccctcgaggtcgacggtatcgataagcttgatatcgaattcctgcagcccaaagcgacaggtgcacgctcagcctcacgcccacacactccatataaggacacaggcgcaccgggctgtcacagcaggaaatcaggagggtttgaactgtcagaggggaaagtggaaaagcttaaacagtggagctggaataggctctgcccccatcaccctgattacctgttggactttgctcaggtgtattaaagcagctggacagatgttagagattatttctgttttgactgaaagctgctcgtcagacacacacagaccgtaacacacacacacacacacacacacacacacacacacacacacacacacacacagtgtgtatcaaattcactgtttacaaaccatgaatgactcataccaaaatcatcaatatgatcaataacactgatgattattatcactgtgatcattactgctacgcgtgttgtgacgcaccagcaccagtgggggatccactagttctagagcgggccgncaccgggggtggagctccaattcgcccctatagggagtcgtattacgcgcgctnaatggccgtcgttta

SEQ ID NO: 359 - DNA, 607 bp, Orechromis niloticus
  misc_feature 6, 8, 601: n = A,T,C or G
tttganancgttgggtaccgggccccccctcgaggtcgacggtatcgataagcttgatatcgaattcctgcagcccccatgttgacaaaccaggattcatgcttttcaagactgtctgtccatccgtgccaaggacccccccatagaggcatagagctacagccaccatgaccctgttccacacacacgcacgcatacacacacacacacacacacacacacacacacacacacacacacacacacacacacacacacacgcctctctcatctgtcctttcacatgtaacccagcagaacaaaagcaaaggactggaaacacattttcccgtccttatgagcacttcacttcctgtgtgcatatgtctgtttacatatcactcctgcccttcatccaacacgcttacacaaaaatgcatcacccatttgtcccctactttttagcccatgcttgtctgtaaatatatatgtatgcagcttcttttttcattaggatcagagtgcaggagcccaggaacaggtccaagaactgaaacataaggagattggaaagaaagcgttgtgaaatttggagggaaccttcagcttttcacgctgctgngatgga

SEQ ID NO: 360 - DNA, 542 bp, Orechromis niloticus
  misc_feature 440, 491: n = A,T,C or G
tttgtgccagtgaagcatgtaggtgcatgcttgtgtgtgtctgtgtgtatatcgatgtcttaggagagacgttaatgtcctgggagcagaccgtcactttggtgagagtaaatatacctaaaagcgccctgagagcaacaggactcttctctcactgacacaatattattctgctgttcttcacaagctctggggaactcgtacacacacacacacacacacacacacacacacacacacactttctctctctctatcccaccaggcttgtttatgagtgtgattacacagagagaggtccggttgtccagctcacctgagagcgcatcaggtgcagtgccctggggctttgtgcctgtttgtgtttggacagtgctgtgtatttttggaacggcacactttttgtgcctgacagtgagttttttggttttgtttcctgntttattccttctgttactgtgtgaaaaagagatatagtgtttgtttaaggngtcccatgttgggttagatgccccaaacttctggggtcctaaaattcaacc

SEQ ID NO: 361 - DNA, 270 bp, Orechromis niloticus
tgcagctgaccttcactcttatctcacttatggctgctaacatgcctgatggatgtttccttattgtttgtacagactgacccgtgtggaatctgtttacaagacttgtgtgtatatatgtgtgtgtgtgtgtgtgtgtgttagggggggtctgggctttcatgctgtctgctcagttgtatcccacactactgaaaaaaaaccacacacacgatactgaaatgttcctataactgggattttagagaaattgaaacagcatattagtct

SEQ ID NO: 362 - DNA, 601 bp, Orechromis niloticus
  misc_feature 4, 5, 7, 8, 9, 10, 11, 14, 22, 23, 26, 27, 32, 35, 40, 42,50, 54, 59, 80, 83, 84, 105, 128, 133, 383, 435, 462, 538, 545, 548, 569, 572, 573, 574, 576, 579, 598, 600, 601: n = A,T,C or G
aggnngnnnnnagnttatcttnnatnnggggnttnaaggnanccttcccnctantgggnaacgaccctatcgataagctnganntcgaattcctgcagcccattnaccatcaaacagacacttcattnggggngcagtgataacaaatacattgtgtaggataatgatggcagtggttcatattgttcattatacgtctgggtgtcatacggcacttgcaaatttatacgtctgtgggtgcttgtgtgtgtgtgtgtgtgtgtgtgtgtgtgcgtgtgtgtgtgtgtgtgtgcgcgtgtgtctttgtttttgtcattttcatgtttcagcaaattaacgtctgaaccattgggaagaaaaatataccatcatttgccattggngacaaacaatatattttggataatgattgcatctattggcttctgcatttgnaaatgtgaggtaatgaatttcctttgngagcaatgaaagcaaacagacatattatgtcactttgcttgaacagggggggatccactagttctagagcggccgncacccgnggnggactccaattcccctatagngannncntantacgccgctcactggcccncnn

SEQ ID NO: 363 - DNA, 664 bp, Orechromis niloticus
  misc_feature 2, 3, 14, 19, 460, 565, 582, 592, 617, 637, 645, 654, 655,664: n = A,T,C or G
tnntttgatccgtnaatcnctttgaaccggcccctccctttaggtcgacggtctcgataagcttgatatcgaattcctgcagcccactgctatccattgacagatattgagttttcccttcatgttgctgccatcacctcttgcttatcatgctcactcttttgcagctataatagcagtatgtcactggctaccatgtatgcacacacacattatacagtgacatatacacattaatccataagatatgctaattgattatataaaagacatagtctttccttcgtgtgtgcacacatgcacacacacacacacacacacacacacacacacacacacacacactaaaacatgcacacataacctctgccctaactcacagtgttctttgtctctaatagctgctaactcatttagcacttcatgttagagagagagtggagtctgagtaggagggggnggatccactagttctagagcggccgccaccgcggtggagctccaattcgcccttatagtgagtcggtattacgcgcgctcactgggccgtctgttttacaacgtngtgactggggaaaaccntgggccgttnccccaacttaaattgcctttggaancacattccccttttgccagnttgggcgntaatagccnnaaaaggccn

SEQ ID NO: 364 - DNA, 620 bp, Orechromis niloticus
  misc_feature 3, 4, 5, 6, 7, 8, 9, 10, 11, 13, 17, 19, 22, 26, 28, 31,36, 38, 44, 47, 56, 617, 620: n = A,T,C or G
ggnnnnnnnnnancttntnttnttcnanaanacttnantgaacnccnccccctttngaggtcgacggtatcgataagcttgatatcgaattcctgcagcccccctcagatcaagtttcaaacagccatccccgtctttctccacactcaaacacacacacacacacccttgtatatatatacacacacacacacacacacacacacacccttgtatatatatacacacacacacacacacacacacacacccttgtatatacacacacacacatttcccttcaagatgcacaatcaaacgggctcacagaaaatatactccactgaacaccctgtaaaatgtctttaggctggagacatgtgggggatccactagttctagagcggccgccaccgcggtggagctccaattcgccctatagtgagtcgtattacgcgcgctcactggccgtcgttttacaacgtcgtgactgggaaaaccctgggcgttacccaacttaatcgccttgcagcacatccccctttcgccagctgggcgtaatagcgaagaggcccgcaccgatcgcccttccaaacagttgcgcagcctgaatggcgaatggaaaatggtaagcgttnatn

SEQ ID NO: 365 - DNA, 142 bp, Orechromis niloticus
aaattagtactgttacatgaagaaaactctgggttaagcacacacacacacacacacacacacacacacacacacacacacacacacacacactaccaggggagttgagagtcctgcgcagcatctttgctgttcctacgat

SEQ ID NO: 366 - DNA, 584 bp, Orechromis niloticus
  misc_feature 17, 24, 43, 81, 383, 407, 427, 440, 584: n = A,T,C or G
ttgcttcattccttgcntccccgnggtggtcggccgctctacnactagtggatcccccccggggtgaaagagatgagtgtntgagcaagaggaataaaagacaaagagagcaggggaaatagctaatgatgagagaaagggaaagaggtgagcatttgatgagactgtatttctattaaactgtcagagaatttgctctttttctgtgtgtgtgtgtgtgtgtgtgtgtgtgtgtgtgtgcgcgcgagcgcccttcacagaggcacagtaatgtggctgacccaaatgactaggaaaatattgggagagtgaaagacggaagcctctgttgaatactgatgaagctcagcacaaagcttcctcctgggggctgcaggaattcnatatcaagcttatcgataccgtcnacctcgagggggggcccggnacccagcttttgntccctttagtgagggttaattgcgcgcttggcgtaatcatggtcatagctgtttcctgtgtgaaattgttatcccgctcacaattccacacaacatacgagcccggaagcataaagtgtaaagcctggggtgcctaatgagtgn

SEQ ID NO: 367 - DNA, 497 bp, Orechromis niloticus
ccctcattttttgttgtctccagacctctgcccatatttccaccagctttttccttttcttgcttcgttggtgtgtgtgtgtgagtctcttcctcagcccatctgtttgtaactgtgcacgtctgtctgccttacaccagactaaacacatacagacacacagacacacacacacacacgtacattcagcttttcattaaatataccagtgacaggatatgacaagctctcccagctttttaatttagcgccggtgtccgcccacctcctcagagagctggtctaaaacctgtcactgccaacagttgagggatgacaaggtaattaatagtttcactacaatgcagccaactcttttaggagctggacagacaggatgagcagaaaaacaaggaagcatgtggagagaggagagattaggaggcaggggatgagcaaaaaatattgacagacagagcaggaagatgaacagaaatagtctggtaaaccagacgggg

SEQ ID NO: 368 - DNA, 780 bp, Orechromis niloticus
  misc_feature 3, 4, 15, 18, 44, 45, 519, 573, 631, 636, 664, 667, 670,685, 689, 692, 704, 710, 713, 715, 730, 736, 749, 752, 762, 763: n = A,T,C or G
ttnnaagcccttggnagnccccctcgaggttgacggtatcgatnngcttgatatcgaattcctgcagcccccttccactgttgaagctgtcacaggatttgatagaagagcatatgattgctacacctgcacttgcttgcttttcacttttcacctctttagttacattaaaaagtctcagtttgtttggcttacacacatgcttgaaaagacacacttatctcactcacacacacacacacacacacacacacacacacacacacacacacacacacacacacacagacgtctcacctgttttactaggtaaggctcaaaacggatcatctaagccaatcacctttcaggaagcagggatcagccaaaatctcctcaattaatagctaaagtaaccttcagtgacctgactgtggtctaccacaaacacacccacacttacacacagacatgcgcgcacttacacacacactctctctctattgtcggtccatttaccattagtctgggatttttttntattcatttgagtatagcttagtattagtaaacatgtgaggaacaggatcaagnatgtgaggcacatctatctatctaaactgtaagggtggactgaccttttccctacctntaggngcttagatgaaaagatgaatgcctgtcnggngtnaacaccggatttttntttnggnaacaaaaactgntggacnttntngctggcagcaacccntccttngataggactgaanagncccctgtctnnaactgggtttttatttg

SEQ ID NO: 369 - DNA, 590 bp, Orechromis niloticus
  misc_feature 2, 4, 5, 6, 9, 18, 23, 26, 32, 33, 34, 36, 42, 46, 52, 54,58, 60, 67, 70, 125, 132, 134, 136, 140, 326, 327, 392, 405, 429, 474, 497, 501, 502, 504, 505, 507, 511, 513, 520, 528,530, 531, 539, 540, 541, 542, 544, 545, 546, 549, 557: n = A,T,C or G
  misc_feature 561, 562, 563, 564, 565, 566, 567, 579, 583, 587: n = A,T,C or G
gngnnnagntatttgtcncaaanacnaaaaannncnccccanctgngaaacncnctancnataagcnggngatcgaattcctgcagcccacaaaagcacccagatgttcaaacaccggggggacncaaaaanantncacncacacacacacacacacacacacacacacacacacactgacacacaaaaggtttcatttgaattcaaaccaaattgacttcaggcaaacaaaacgttgctgaaatgatattttgtgttagaatctaagaattcaggaaatatgttataatgaatgaattatcagcagctttgatactttcagacgnngtatttgactcgctctggtaactgaagctaacctgtgatgcagtttggtttgttcgcgtgttgtnagttgcttgtgtngtttctgtttgccttcctccttgncttgtgtgggggatccactagttctagagcggccgccaccgcggnggagctccaattcgccctatagngaanncnnantacncncgctcantggccccncnntttacaannnncnnnacngggaaaancccnnnnnnnaaccccaaactnaaanaccntgc

SEQ ID NO: 370 - DNA, 278 bp, Orechromis niloticus
  misc_feature 69: n = A,T,C or G
actgacacacaaaaaaaagccaacggtctgaattgagatgaaaatactgctgtggagggagcgacgctnaaaataccaggcagggctgcaattagtggtgtgtgcgcggagcagctgctgcggttcagagcactaagtgtctctaattactgctgcagagagtgtgtgtgtgtgtgtgtgtgtgtgtatgctgatatgtgcacgcccaacccatgaggggtgtcctctgctgagtatctctatttaacatgctctgtgtgtgtgtgagtgtgtgtgta

SEQ ID NO: 371 - DNA, 317 bp, Orechromis niloticus
ccatccatgaaaccatttgactcctaaagcacactgttaagtgagaggatgcacttctccttgatttaaatgagcagcgggtatcagcagtttagctcctgcagagcatgagctccacacacacacacacacacacacacacgcttacacattgtcacataagagaagttatctacttgttgctgtatggagagctaaagcttctgttatgaaaaatgggctattatcttcttattgatcacattgttgatgagacaaatggcggaactgatagatggggttttatcaccttaactgttgtcagtatgaatatggat

SEQ ID NO: 372 - DNA, 421 bp, Orechromis niloticus
  misc_feature 413: n = A,T,C or G
atatgttctggacactcaggtgaagagaggtgctgagctgtcaactgattaccaggtgttggtgagatggatcagctggtggagaagaatgctggacagacagacctgatagtaatggtgcgctaggaatagcaatagtatgctgcttttaattagaaatcaatatcacatgccccccagaaaaggaaacaataatttttttccacatcttaaaggcaggaataaattaccctcaaaagaattacactcagtgaaaatgttgccttgcgtgccaattgctcttcttcttttttcttacattcttacatgcatgaattctctctctctctctctcacacacacacacacacacacacacaagctggagatgaaagcctcattcaaggtgtaactgtgttataaaaagaaattanttggagat

SEQ ID NO: 373 - DNA, 324 bp, Orechromis niloticus
  misc_feature 8, 167, 246, 269: n = A,T,C or G
gacgtctncactctacatggaaaaacacacacttactctactcatcacgctctgttatctgtcagcaattactcactgcctcctacccaccaaacccctcgagaagcattactttgaaatgcccagaaacacacacacacacacacacacacacacacacacacagntttacacattcacactttcacatttccacacctgtggagaaaaccagtttctctggcattttatcagcttatttgctgntgctatggaaacaagccttgcanagagagatgggatttgtgtgtgtgtgtgtgtgtgtgtgtgtgtgtgtgtgtgccc

SEQ ID NO: 374 - DNA, 567 bp, Hippoglossus hippoglossus
tgacctcatcttacagtttcagttgtcgaggttacagtgacatttatatgagaaaaagtatgtagagatatgtacacagaaactgcactggttagcggagtcatacaaccgcagtgcggtaattctagttttgttttttttataaatgggttagctatttttacaatctacaaatagtaatcaatacattttgtcacagtatgttacacaaagaaattggcattaaagttggcatcttgttgtctcaccagcctgacgatacagctgaaatctttgctgcttaatgctcaaatagagtcctcaatggcgttctgcaagtcattttgattggttggtccttgtgaagaggagaataaaatgaattagtgccaatatcagtttacaatcaaacctttttgtgtagaccttgtgtaaacagagtcaaaggacattgtgcaacaatgacatacattttttccacagtacctgtcgtccactgctgaacatctgacacccattactggactgtgtcttcctgtagagtggtgatgttctcaaggtcctttgcacagtctgtcaaaacaaaat

SEQ ID NO: 375 - DNA, 695 bp, Hippoglossus hippoglossus
ttggcttcattgtgttgtctctatatagagtttatggtccagatatttttatagctttggttttttactgtctttaacagttctgctgcagcccgttatccctccgatcaatttttgttactggctttatcaggaatgtgacctcacatccttttttcgaggctgaatggtgatacatttaattgagaagaaatgtaatgccgccatgtctgtttaaaatacatgtagaatatatacggtgtgataaaacatgtgtaacaacacccagaggagacacagggagatgtccatcaaatccagtttctaaaggtccacattatccgtggaggggtctaacaaggcagcaagtgaaataacgtgtgggtggttgttagcagcttaaaagacgaactggaaactttgtgcttcttcatctctgttcagaaaggagcaggaaaaaaaatcaatttaaaaaaagaaaagaaagctttgaaatacaaactgtaaaatttgatttcaaatagaaaatattcaataatggctcagagtcaaattgttctttaaaaacacatttggtcacagcgtcgttcttgtttaatgtttccatcaacaacactgactgatttaagattccacttcaatccacgtcaccagattcctgctcacatgtatgaagtctgacaccaacatgtgtacatacataaacaatgacattc

SEQ ID NO: 376 - DNA, 598 bp, Hippoglossus hippoglossus
ttattgttggaggcattcattgtatgttttgtttctatgcttaaatttccatcgctttacaattaacccttggtcttcaaacttgcttgggaaggtggcaggaaatgtaccactctccacaggtcaaattccttcatgggcagccgctgcgctacttggaccgacacagatggaaaggagcacacctatggaatatactgatgatgacaacacatgcgcaacatgtttccttccaaatgtggagttatgtttggtatatttatgtaaaataataaagcatttttcaactgtcatgaggttctaggatttctgtcaagaacgttgtgtttgtggtcctgtttaatacaaatcaatatagtgatgggcggcgtggtggttagcagtgtcgccttacagaatgaaggttcccagttaaatcttgattttctagtttttatctggtactcctctgacagtccaaagacatgcactctgtgaccgttggtgagaatagttttgtttcattgtcagctgggtgggattggctccagctccccccgtgactctcattgatggatcgacatttccaaaaatgatataacatatgtattgcagcact

SEQ ID NO: 377 - DNA, 692 bp, Hippoglossus hippoglossus
cccaccttgggcgtcacgttctttatactgcagggagaagaggatggagaagttattctggtccaacactaccccatccagtgggatctgaatttagttttctccttttaccaccaggataacgtgacttgtacactgaagatatgttagttctaactcccataactgtacacactggctgaaaagggcaatactgctgcatgccaatctacaacctcacaccgcgccagaaagaaagaaagtttgtcacgatcactgttttctctccacactgccatttcacgctcagcctgtttgccagctgagagctaaatggagcgatttgtgagagaaaaacagctgagtccttccccgccggtcgacttgctgcaggtgtggggaggaatttgcctctggaatgtattttctaattaaggattatcaacagcccagcgcctgctgagagccccagtctggttttgggcaatcaggaaagcctctctccattttattcactccaaaaatatctcagtgtcacgctctcgcgttctctacgggatagaggtagaggtctagtttacatcctgcagctcagacactcgcaaattcacaatttgctgcgtgttgttgtgctggtagctcagagtctgaccttggaggagagttggttggctgatgtttggttcataagtgcagtgtgtgaaatctgactt

SEQ ID NO: 378 - DNA, 475 bp, Hippoglossus hippoglossus
tatattatgggacatcctgtgtgaatcaatcaatcatcaatcaatttgtgctgccacaaatctgcacaacttttgtggggcacaaagtcagctgccgctaaacatctgtaacaccaaaggcagctgcctccaaactgtgtggcatcaaagccaactaccgttacatgtcagtgtcactttctgttgacaccagaagtacgagctaccgctgccacgatttgagtttgcccttactagtaaaacgaacgtagcagcctgagctgccattgacttcaacgtttgagaagcaacaggaaagttgagcatactgatgtttgtcaacgaaaacgagttaatattcacttcactggcaggaaatattattatactgacattttacgtgtccaagtgaatcgtagatgttaaattgtacaatgtctggaggcagtgttcgagttgagccgccttttgttgacttcagtgatgtttgcgtcgg

SEQ ID NO: 379 - DNA, 605 bp, Hippoglossus hippoglossus
acatcaagtctttaccaaatgcctaatttttaaccataactttatagcaaaacatatacaatagccacaaacttccaggcaaaatgtttgtggtaatgatacatattacgcaagcgcaatttttgctcttctatatgctaacttttgtctctcaaattttttttttactgctgctaattaaaggctaatgaaagtggtgagacagactgcaatgttactgtaaaatgctaaaagaaaattgtgtatggttgcaggtgataactgtgtgggtttgtccccacaagctacaattttaacatgacttccacgagcatggaccacaccacgactgtgtatcatttgaatggaaattcaggctgtataggattttgcggatggatgaatggatgtggaaggaaaggatgaagatggatgaagaatgtctctatcaggctggtctgtgaggatatgccgtggactgggcagatatagactccgtctcagtaacatttctgcccaatctgatgtcggacccccaaaaagtcagattttatttgagctgggttgactttgggcttgaagaatatcgttgaggttgttgcggatgtaggaaagcattgttgtga

SEQ ID NO: 380 - DNA, 870 bp, Hippoglossus hippoglossus
gtgaaaaactaataacttgagtgtaatatgaaaacgtattcgaggttattggtctgatctgtgttcaaatgttcaagttcaataagtctctctggatgaatcgtgtttcttccagcctgtgtgaagttgcataacggtctgtgtgccctcattaactgagcatgctgagaatgaagcaagtggtgatttaatttcttatcttattaaacttatacctacagaagtttcattccaccaaatatttgtccttacttgggtcaataaaggcaaaaggggagaatggatttataatataaacgtgcatctggacttgtgtctacttgaaaagaagatgaagcaggaaatgacctctctaatttatatgcacattataagtgtgatcacatgatctctggatatgggaatgagagtatattactatgcaaagtaaataaaacaccagcatagtctgcaatcagctaaattaaaagctgaatcaatcacataatacaatatattatattctcttgattttattagaaattggttttatttaatttattggattatttttatattttaattattttcaacttttgtgtataagtaaatcattttacatgcaatcagaagacttggagacgtattaaaaaaggcagacataactcatgtcttttagcatcatcaagtctattcttagtgtctttatctaaagataaaatctcaaaatgtgccagaggactgagtgagttttagggacaaaaggaaaaccacaacacgcggacgacgtcagtaagttcactttggactgcagagaagagagaatttcatttacagtgcagcatttaacaattaatgcaaaatataactagaaacacatgttgaccgtta

SEQ ID NO: 381 - DNA, 611 bp, Hippoglossus hippoglossus
attactatttctctttgtaacaaatacagaagtgttcaattagtcacacatacataactgaagaaatactataaactttgcaaagacagtatatattgcagtatagaacactcaaaacagcaacacacacaagtatttaaaagtgaaatcttattcaataaaagacaccaaagaaatatatttaaattatcaatgttgttactgttgtacagaaaaccctacatactgcactacagaacaggcattttcagcagttgctggaagctctatttgcattttgtcaccagagcacaatgaatcctgggatcactgctgtagtggtaaaaactatcattttcgagcagctctcccacgctgttattaaaaaggtggatgaacttcagtcacccatatacgagactatatatagactaggagagctagagacaactggaaatctaatcatatagaccaatacattagcattttattactattatccttattgtatatatgtactggcgtgggataaaacaatagtagaatgtaactaagtacatttactcaattactgtttacaaatttgagggactacattacttgagtgttgcaatttctttttacttgataca

SEQ ID NO: 382 - DNA, 360 bp, Hippoglossus hippoglossus
aaatggcaccaaacggtgtgtgaccgggctgtgtgcattcgtgattattttcgtcaagtggtttggacggtgaccttgtgtccgcagtgttgtgcagccacgggcgttttaatgtctctaatgtggcgagcagctgcagtctgaggcagcacggtgcgtctgcacatgagtgattgacatgtcagacaagcagcgtgactgaagcgtgtgtgaccttcgagttgcttcaaccgctttgtctcgacttttgctccagatctatctgtgcattgatcgatctggatcaaacgaactcactgctctttctctgcagtccactgataagtttaccacctgctcaagtgtgcttgtgcatttagt

SEQ ID NO: 383 - DNA, 1000 bp, Hippoglossus hippoglossus
ggtctcttgcaagtgatatatcaagtctgcatttaaggaatttcttcagattttgacaaaagattaactgatgagatttcagtggtcgaaggtaaaagtcatggtgacactatatcattgtgaatgtgatatgtcaggaacacctggagggactgaaactggcataaaaccactggactctatctaacctagtttaacattgtgtacatttgaagtaaatcaatcaacatgtctttctgtctcctccagttgtcagatctgatcagtgtgaagctcctcaatggtacgtctgccactctcagcttcaggtgcaatgatgagagtgttcaacttcctcttcctgtcctgtctcacatcaaccaaccgaaggaaatagtgagattatgattatttagtagattttagatttatgattaaataaaggtcatatgattcatatcatttactctgttttaacagctctgcttgcagacagatggaaagtttacctctaattttgctcaagacctgccgctggcgaggaagacaaaatcccctgttgtggtcctggagaacaagaggaccctgactcctgtaaaacacattttatgccagtgtgatgtttgagtgctaaagcttgtcttatgctgaagttaaggttaggttaagataggttaggttaaggtaagggcaaacacaaatcaattgggaaagagactgtaacgcgatgtctgtataagagattgtgattataatcagccgtaactgtgttgaccatagaaatgtagatcattctttagataatcaggtgttttcttttctcgtatagaaataatgaaaacctttgattccttcctgaacttctacaggttctgcagacaccttcactgagtcactttgtatagaagatcttgctaaatgcctcctgttgttctgcctcatatattctaccatgcaagtaatgatgtatggcaggtgtcggtgggcacccaggagatgctccagatggtcagagaggtgg

SEQ ID NO: 384 - DNA, 682 bp, Hippoglossus hippoglossus
cagcgtgtgggtctatttcagaatcaagatgaagacattagaacagctgcacccttcagtgggtggtaacatgcaaggcgtcccatacgctctattgttgccccaggcttaccctgtacttgctgctagcatgtacacataaactaatcataacactaatctcaccatgctactgtacacttgtgaaagcagaccatctgtgcgggcttcccaattagctgccgtcatatggcacaggatgggaaaaagatcggagtcctcgctacaccactgtacaggagaaaataataaacagcacgcttgactaatccgccgttaagctgcaggatttcatctgtaaagccccgaagataaagttgcgggtcttcctgcacagaacacgaccattgtgcatcctgtgaataggtggattgtcctgtatattatctccaggatggcactcgttagacaaatagcttacattgtcttccaacaaaaaaaacccggtcaggagcatcgatcagggagacacgccttatcaaattacaacagccaaacaacaggcaacacaatcgtgacgagcaccagggcaataggagcaatatcttagaaaccagcaacacaaagaggctcataagagatcccaatctatcaagcagacagcggagagtatgcacgtgtttgcatttgtgtgtctttacct

SEQ ID NO: 385 - DNA, 797 bp, Hippoglossus hippoglossus
cttgacaatgcatcacatataatataaactaatgaaaagctcagggctccacactaacttttcccattagtagcactggtgctgcctactgaaaattttaggagccccagcataacatttagagcactgcgtattgtaaattgacatgtagataatacacattacatggtattttgccatcaaatctgagcagcatcagtgtggctgcaccacgtgtctgaaaaagacattcgatttctagtcttgcaaggtgcgttccaaggaaatccctggagtaacaaggcaaccaaaaacatttcaacacccaagaacctcatcactcatttgatggttatgacaagttttcaatgcaagctaaaatttaagcaactcaccaactgcatttatacaaaatgtaaaaaaagtttcttgtcataatatgatagattcgtatcgcacaataatgtgaaaaacatcttgatataataataaagtgttcacattacaacaggatactcatctgtttttctttttctggcatggcagcaacatgctcctgcacagttcagtacatgtgctttcctagaaatagttcacagaaataactttgttttaaaaggaaggggtcataaagtagtgcgtcaaggtttttataggtttatcaaatgaagacatcaaataacagtataagattattactatcattacagcacaacaacatacccctccttctcctcccttcagagcacatccctctgaaccaactcctctctcctggtaaaggtttgcagacgggacgacacatttagattcggtat

SEQ ID NO: 386 - DNA, 587 bp, Hippoglossus hippoglossus
ggccagggctagacaatcaagcattctctgcaacaaggaggactttcagttagcacattaatccagatgttcttggattaaattgatttgggttgcaagtaaagactttagacgttttggtcattttagtctcgactaattccaagaaacaagaaattttagtcaaagccaaaaatttagatttttggcaaacttcagcaaactgctttccaattagattagaaaaaacattggcaaacccagtgcgattgaattactggaatgaaagtcaatcacagagtaaataacaaaaacaatcagagagtacgttgaactaaagcccggtcatgaatcctatttttataatgtctttgtcaggtctgtgccaagaggttgttgatttcattctatagttgtgtaggtttgttggtggtaagtgttgaactagattgtgttacacaataagcagtaggcagatagtcgagctgagacaattaacacatatgttaaagttaataacggcgtaaagcatcgtgatgtgtcgagctgctgtcagacatttcttacccgtttctgcaaatgagcaagaagacatcatggtcatagct

SEQ ID NO: 387 - DNA, 584 bp, Hippoglossus hippoglossus
gtattattattaatctaaagcacattgacattgtcgtctaaatcccaggagaagtatttcactaaaataaagaactctctaaagactcgtcatctaaatacaaagatcaatcagtttgagagataaagaattacaagtcgacagatgaaacaatttgctcatttagggggaaaacaagtgtttttatccacttttccttcgtcgaacgtgttcataaaaaggggagaaaactgtcagcaaagcacaaaacgtcacttagcagacttgaagccaatttctaccggctataatagcagtacaaatgcagtgtcttgtattttctttctttgagaatgctttaattgcatatgtagctgcagcgttatgcttgagactgaaagaaaggttatgattcccaattaggatgaggattagttgccatggagacagctgcctccagattccacagtaacacaaaactaatttacggagccggagcttgatataaaaaccaaatttcattttcaaaatgaggcatcacttcccactcacattggtacacacgtgtatcgcaaagttcactcgagatctggcaagtgttacat

SEQ ID NO: 388 - DNA, 525 bp, Hippoglossus hippoglossus
ctacaactttaatcttaccagacttagttcttgctactgaaactgaggaatacatgagcaaaaataaaatctacttttgatattctttcctaaattggcaaaatcagtacaagaagctaaatctttaaaacacgagttcgaaatggcaaataatttttaacatgtatcagatccaattcaactttaaaaaaaatcctggttaaatggtaatgatatggaaccaggaatgtctctcgaagtatctgcaaaatgcacaaaataaaccacaatcagctgtaaatatttggtcgttaaccttctgagaggtttcccttttcttcttatcttctttcttctttttcttgtcttccatgaactactgttccctttctggattctcctgtctggggtagagaaaagtacacgttcagttattgcaacacctcaagtcgtacggaaaagcaacgcaatgcacgcacacaaatagataatgtgcacttcatccgaccagtgccaagttttactcctacacagtcagagttgtaa

SEQ ID NO: 389 - DNA, 465 bp, Hippoglossus hippoglossus
ccacgcccccaaatattgactgttgctgtagcagcggtagctaccatgggttcttttgacttaatgtgactctgcaccgcactgatttaacgtgatgcatgctggttagaaattttgtctgacttttaccagcgctgcaaaacatcaccatgtcacatgaccttaaaatattgtgggagcgagtcagctgcaatcagaccgtgcagttgttctccttcagctgcagaacctgggaaccacagtctatggaaccagccctgtgacaacataactttgtcctgattggctgaacacatgaagaatcttacgttatattcttacacattcagaacaactacctgctgcctatttttctccaaagaggatgagatgtctttaatctctacctgacaattttctatttacactttacagtttgaattttcagtcgttaaaacagttttgttcaggagattgttcgtgtga

SEQ ID NO: 390 - DNA, 553 bp, Hippoglossus hippoglossus
aaacattccagcatccacttttctgtcccaattatggtcaaaggcgtgagaggagaaagttgaactcctctcgccaaactccatctggaggcgctgtggcggcacgatccgccaagtgctggcggggctcactagcattctgctcttgaaaataatgaacattcagttttgccatctaccgcatatcctgccatcttgtgaattaagggagggaagagggagtgatggacagacagaggaagagacggaggtgaaacagtggaggcaaagaaagttggacagaaagttgattttcatctgaacagacaggattttgtagcaattattgaaatttgtcaaaaatgacaaatatatgtggaaagacagaaactctcatagctcgatagacagaacaggtgacaaatgagaaatgaacataaagcacattagcatggtgttgtgttgccatgtgttccgatcaggatccacgttttttttcatcaaacgataaaggtgatcactttgaattcatttgcagtgactccttccctctaaaagaacaagtggaccaaca

SEQ ID NO: 391 - DNA, 376 bp, Hippoglossus hippoglossus
cgagggctagtgctttatacccttcggatttttcagatcctcacttccaacggaggggtacccagaattcctttcaaatcaccagcaaactgggagagagacccacaaatgtagtattttctccatgaataagataaaaaaattatgagtattatggtcacctttttctcaacaaccttaaagaacaagattgcgagcgcgctagcatgctagggatcttttttctgcatgatattcctgtattttcacataatgtcatgtcgcatcccccttgaagggctgtcccaattcgtagggaaatgtttcaaccactaccccttgtgactccgtttcaaggggcaggataaccctcaaaaacaaggggtgaaatgagatt

SEQ ID NO: 392 - DNA, 515 bp, Hippoglossus hippoglossus
atcggagtaaatggtcttcagagatacactctaaagccgagtgagaatttttgcgcttaaactgcattctcagttcgatggaagcaataaggtagaaatggttttacagaagcctttggaccgagagaaacaagagcacatatcgttagtgttgactgcggaggacggaggagaaccacagaggacaggaacaatgcagattcacgtgactgtgttggatgtaaacgacaatgcccctgtcttcggtaaacaggtttacaaagcaagtattacagaaaactccgcaataggaaccctcgttactaaagtcagtgcttcagatgcagacaaaggctcaaacggcgaggttacatacgccatagggaatagcatggataccgtttcaaaattatttcacattaatagtcacggtgaggtgatactagatggtgcaatagactatgaaaaagaaaaacattatcacatcgacatagaagcggtcgatcagggcggactctcagattcaagtaagataa

SEQ ID NO: 393 - DNA, 374 bp, Hippoglossus hippoglossus
agcactaaaaatcaattaccctgatcgcagcaattaacagtcaaatgatcgagcaaaggaaataaatttgatatttacaataatgcaattggaaagcaagtaaaacttagagctattctagattagggcttaaagtcaaaatgattcgagaataaaaagcatttgactaaagttgcaaattatagtattcacccaacaaatgactgcctgtttcagtcacatgaactctgcttctccttttccgtttgatccacagaatataccgggctttataaatatgagtgggagtttaaccgtgggaattgaacctcaggaggcagcatttgtttatcttctccccgtgaaatatctccaaaaatgcaagagagggcaac

SEQ ID NO: 394 - DNA, 499 bp, Hippoglossus hippoglossus
ataaaagcaacaatagtgttttctatcagaagatccgaactgtagtcattccatttcataagcaataacacaaatgtttattacagtttccccttaacctgtgaaatacttcaaccatatactgaaaaacattatcaaagactttacgttttggaatagcaggtgttgtttcatgtagctttacagtatcattactcagcgtcatgcttcagagcatagagacaaagtgtaaacatgaattcaaataaattattaaatcgcaaaaaaaaggaagcttggaattttcttgttcttgcaggttaagttacaaactggaaggcaaagacaatcatcgagttttacatccagtcgtctcagcttggagcgtttgagtcctgagggtcaccgagccgcagcaactttgagatcaaggtcgggcagcgacgaacagtcaaggtcaacgatcccgtcccgcgcacgcgagagcatctctgttcgcaaaagttccctgagagagtcc

SEQ ID NO: 395 - DNA, 388 bp, Hippoglossus hippoglossus
tatcgttttcatcaaagttttcattcaggatttctttctcataatcaatatgactcaataattacaaactataagaactatttccagcgtgatgctacttaaatacggcgaattgatccaatgcagaggggcgggatttagagatgtcaaaaatacacctcagttttccaaagaaatgattgattacaccgtggactaatgtcacgcttaatagcaacaataataatggtctcattctaaatacacataattgtgtactgtgagcgtatgcaggtttatttttattcctatgtttgacagtttcaccatattctatacaaagatgcatcaatcttattttttcagatctgattctaatacctgaatttggaacactacctataccagt

SEQ ID NO: 396 - DNA, 452 bp, Hippoglossus hippoglossus
acttcctcatggctattttgacaggctctataaataaagttacgaaagttattaaccaacattgttacagttaattctgcttctatcctggaggaggaggaggaggaggaggaggaggaggaggagagcatcattaagttaagtatgcgtgaggaagtgagagcaggggaaatacagatgacttcatcgccacaccactgatggaaagtccaatgtgtcagtagtaacaatctcggtgttgtgtatttgtcctcacagccaatcaaagggcatttgtgcttttatgtgtgtgtgtatatatgtgacacctttgttttgtctgtgtgtaacttcacccaccgtaaataactgacctggtggatgggatggtggacagcctcattaaggacaatcccaagagcatcaattgatggctgacaggtggagtcgtgggttcagcaaatgtcaaaatg

SEQ ID NO: 397 - DNA, 490 bp, Hippoglossus hippoglossus
ctgtggcgctctctctctctctctcctcgctgtgctccagctgactacaaacacagattcagtgggagacagttcgatgcccgtcgtccatcttcactggcagcgtctcctctccgtggttcacccagggagcgccgtccaccggggatccaccgagctaaataacccaccggacccagataccttatggagtgtgaagaaatattttttgtttataaatcttctggattagaatgttttatttcgtaagatatgatggaaaacccatgtccgattgtaggatgtgtttagttaaaacaacatttcagtacttttatcatttattatgcttcattgactaacaaaaccttttagcttgtgttgtggagagttcagtgaaccgcagaaactcagagaagataccgaagtagacgctgcgggagcggttctatcacagagtttctgggataaacagccggaatgcgtccaggaacaaacttggattattttt

SEQ ID NO: 398 - DNA, 978 bp, Hippoglossus hippoglossus
gagaaacgagctgagtaagaatgagtcatgctttcaattatgcatcagcctgacggacaggcagtgtttgctttcagatagcagtcaagagaggctagacttacaggtgaccctgtaatctgttgccatgctgtctttacttgaaaaaccagaaaatggtgagaaaaccaatcgaaaaactgaacactctcgaataaacaaacagttataactaatctgaattaattaaaaccaatcaatctgactttctactcctactattacgctccacgtatatgcccacagttccattcgtactaaaatgacggtctgcgtcggtctggcattgctcgcatgcgtacgtgatcccacattccattccattccagtaggtggggtaatgcgcaataaggttgtttgtcaacctccgtttaaatcaagaacttccatcaggaagtactcatcccgaccaagcgtatagctgtgacttctctccaggagttcaccccgtgtgcgtgttcttatactccttcatagattggttgttcaatcatgggtatcggaggatctcctcatgcagcttctttttaaaaccagtgtccatgttgttcatcttcttcttttatttgcaaacaaacaaacatatgttgcacttggagcatgcacagtcaatgcatactgtcagcgtggttacaaatacaaaacatttatgtcacgaggaccatagcggaccctagtggactgacggatgtggaaatcacactgaaaaaagatttgtttaccaacttaaaaaaacgactttaattgatgacacagaaattaatacgttttattaaaatcaaagttatcaagcgtaaaataacatgttaacattcatctgaaccaattcattcatttgtgtgttaccggttaaatatattttctacgttggtaaacaattttctttttccagtgtatgaatttgcctttcatgttcccatctctatccctctggtgtga

SEQ ID NO: 399 - DNA, 682 bp, Hippoglossus hippoglossus
ctacccctgacatcagaaaccaggaacgtacagcttctggaggagatactgatcatagttgctgatattcacacatgaggtgaaagtaacatattgagggcaaatttagtttcacaaagaaaaagctgtcatttatatacatctaccacataaaacatttttaatccttctttaaatttatcttataaaatccctgacacccaagataagtatagatgagttattgatcctcgtagagaaaattcgaatttgacacagcagcacaaaagagcagctgccaaggggatgtagtaagaattaaaactaagaaaagaaacagaagataagataaaaatagaaatactatatacagtattggactgttctataaatattaaagttatgcgatatacatgtacaatatatagcctacctgaaattacaataccacagttgcaatgctttcttttgtgtcaaattaattatctacttaactgagctgcaattttctttgcagcattaacaggttgttagctgagatatataaaacaaatatggcatgagatgaaaaatactatccacaggtagactgcagtaccatgaagtcatggaggaagacaacttgccatctagatgagtttcaagttatacaacttgataaacacacatgattcacctttatagtggagtctccatctgtcgt

SEQ ID NO: 400 - DNA, 622 bp, Hippoglossus hippoglossus
gcgggatgcaggaactccacaagctgttgccggcaactgcaggtgcgagtcactctcagcttatttgtatttgccggatcagccatattaccaataacatgtatgaaatgttcaagaaataaaatgggcaaagtgtgaaatccttgtggtacatcttggattactttttctgtttttgtattatttttaagctttttaattgtgacaaatcattagttgtgtaggggacaatcaagaatattttccctttatatttgtttttagtaattgtacaaaatcctgtataatcttcgttgtttaaaaaattcatttatgtttaattcttctagacgtgtttgttcatattgacacctacactgctgaaactggagtgtcacggttcttggagcaaaacagaaactggaggtcagtgtttattatgttgatctcacgtctgtcagttaatctaatgtgaacaatactgacatttaaagcttaataataatgacttactgtttttaaacagatatgacaaacgtgaggacatgaatccctcaaaccctgaaatcaagatgtactctcatctgctaatggaggctgatgttaccaaaatacatctactccaggacactcaccagcctct

SEQ ID NO: 401 - DNA, 557 bp, Hippoglossus hippoglossus
atgaatataaatagttatccgtgttaataacctaagagcaagttggcaaacagcgtgatttggcagctgtccatctgtctctgggtgtcaaggaaaggctgcttgtgtaagagcagagagataaacatgctgcaatagagcatctttcaaatgactgaacataaacactggaatagtattaaatgtaaaattgataaatcaaatgtcagaaatgaaaagtctcaaatccttgtaactcatgggagaagagacaaatgtggattttgactatgaccttgaatcagtgagacggttggtcatgattagatttacaatgacaaagcactttgtcgtccctggagcttgatcatggagtacatgccattaggagttatggatattgtatgttaggcagttacataaaattaattgagattaatcacctgcaatttaaacgctacagctggttaaaaataggtagctgctgtccatgtacagtatgagacacttgtgttcaatgtctctatataatctacctactaattccacaaacgtctgtatttccatgtgtctttatg

SEQ ID NO: 402 - DNA, 544 bp, Hippoglossus hippoglossus
  misc_feature 430, 434, 436: n = A,T,C or G
tctggttatggaaagacatgatcaagttcatcagtttgaattgaaatgctgcatgtttttaagaaacctatctacagtcatgtcagaaatcagtgaattctctgtcattcatctataaaactgaatgaggacgtggataaaaacgaaggtttctttgctgagtggctgatttgacctctttgtcattgggagaggaggaggtgagttgcagcttgatgcccccgatgtctctcggaaaatgactgggcacaatgaagaggctctgggaagcatccgatgtgggagaactggaggaattttcttgaaagaaaaaaaatcttggatggttttctctgctttcctggctggcagtgcaggaaagcttcatactgcacatgcaaatacagccggaacggggatgaatcattggagcgatgaagaaattgaattnattnanttttattttacaaaaatactctgaaatgattggtgtaaattgtttccagtttaggaagacagagcttctctatatatataaaactattttctcagagtttgggattat

SEQ ID NO: 403 - DNA, 511 bp, Hippoglossus hippoglossus
  misc_feature 129: n = A,T,C or G
atccgataataattcacgtttcttaaaataagtttatagcctttagttaatgcacacctgagggtaaaattgcaaaacatggtaagcaaatatggagtgtttgtttagttttttagtgatgtacatcanaaaacttcaaacaactttaggtggaggaggaaaatttctccttcaaaagaattttaattaaatatttccacatctcaaataatacggagccccccctggtatcaggtgaagaaaaaaaaaagatccattccctcagtttaacaaaccactttacgcatgtaagcatataaatcaatcaatcaatcaaattttatttgcatagtccatattcacaaatcacaagttgtgacatcctctgctcttaaccctcaacaagagtaagggaaaaactactaaaaaaaaactgttaacaaggtaaaaagaaggtagaaacctcagagagagccacatgtgagggatccctctcccaggacggacagaagtgcaatagatgcccacgtgt

SEQ ID NO: 404 - DNA, 575 bp, Hippoglossus hippoglossus
cttctcaattccgggaataccattaaggcagactttgtacctttaatggaactgaaaccaggctccctctctccatttgttctccgaattctaggatcactcattttgttttcgctcattttgtgttgttcactgtcactaacatcggcgccgctgtattctgtcgtcaggttcaacccagcacccactcatggtttgaaggaattaaatcagaagcaggctgaatggaggagatgctttcatggtgcggagcatgaatcagagttcagtgtatagatgtaactcaaagttgttattctgttgttaacactgtaagtttgatcactttttgatttttaataattgacgtgttttatattttcagagactaaacgaggagagagcggagagaaagaaactcaggatgcagcagtggagacagaaacaggaagaaggtacaaatgattcagggttttttgagaagatgtagatgaaatgacaataataaaggaggataaggggaacataatcaacattgaaacatccctgacattatttaataacaaatttgtaaataaattcaattaaatattgat

SEQ ID NO: 405 - DNA, 671 bp, Hippoglossus hippoglossus
tgttgctcttgttttcccaaaatatattcttatattcgatgcccacattgtgtctagaaaatgaactgcagcaaatactgaggagtttttagcctttatcccaaacccctaaacactaatgtgtcctattttacatcctccgttctacttggcaggagattttggcagtaaaaccagtttttctgttaaatattgaaactatcagcttttggctgtgctggtgtcagctaagacagtcccttggggaaataataaggaagagatggacaaacttcctcctgctaaagttcacagacacagttttaatgagggtgcataaagtgtaaatgtaatcactttaaactcgagctggttggtttggacttcacttctgtgtcgtgctttttataacaactgcaaaaggacaacacagaagatattggttaaagtaaaagtttcagtctgtcataactaatttacctgacgactgagtttacattttctacaatttgacaggtgtgtttaacaaacttatagcagttcaactttagttagagctgtaagagaaggtgcaatgataagttcaactaacaagaataagtcaatggactctttttgaataacctaagcatctaaagtgaactcgagtaaactctccctcttactttagatccccaggttattccaatgat

SEQ ID NO: 406 - DNA, 562 bp, Hippoglossus hippoglossus
tcctgcttctcagttgcttcattcataacacatccttgacaattttaggatggtaatctatgtgtcgcttgtgttcagggaagtaggttgtctgataacggctgcgttatgttccagactaacccataatggtctctcttcgactttccctactgcagagccaggtatacaggagccagcctgacttagtgtcagctgtctatgacaccacagcctccactctggctgtggactactcctatgcacagtacccaaaccaaactgatgccacacagaactacagccagtacctctatccttctgagtacactgcagacagcacatggatcagccctgagcaacgtaaggagaacattctcacgctctcagcctttttaagcttaaccaatctctaaatgttaacaggatctttatcagagatcagtcaaacactcacagtctgactcttgttttccccgtagcaccccctcgtcctgcaaccccagagaagtttagcataccccaccgctgtgcccgctttggacctggtggtcacctggttcaagttctgcccaatctcccc

SEQ ID NO: 407 - DNA, 531 bp, Hippoglossus hippoglossus
acttataatcactaattcaaataatgaaccacttcattcatctctgttagtaaaactgaaaaagctcatgagaaaagacactaaacacaccaggttttcaaagctgaattctttaaagcctgcaaacttaaagtaacacagagattagtctgatatgtactagattgtgttattgttattataactgtcatcctaaatttgagatattcaattatgggacaaaatttgtttgagatgaactcatttttgaacagattctttttgtttgtttgaattatcactgtaggctgatttataaatcagtttaagtaagattttgttgtttttgcaagtgtccacattgttgttatgttgcattaaaactaattcaacccacatttttaatgaaaacataactgaagtattaactctagtttttggttctatctgcaggtggtcagaagagtgaccgcagatcggtggtctccagtctcgactgtctctccagcattgtggagcgaatctccactgacaacagcagcttgatgccgg

SEQ ID NO: 408 - DNA, 818 bp, Hippoglossus hippoglossus
ggcactaccccgcactacccttcctggataaaaaacacatgtgggagcccacaacccccactgcataagcaaataatgcctggggattggctagtgcgattcatttcactattattccataggcacgctaacaggaataatatgccattgtccttttatttcttttacttctcatcacctttgtgtaaaatcacatccatccacgagccaaccaaccaaaaaactgtaagtgcaccttttttaaaaaaaaaacagtttgcacattcaagacacataaaaaggtcaaaatgtcactgtgcagtttaactccctctccccaaaagtccttgaccataagcacagtctgggttgtcgaaaataaaatataaaaaactgcacaatttatgaaggagtgtacattttgacacgcataaacagtaccttgaagatatacataaaattaaaaagtcagcatagagagccaacttcagtttctcccataagcccaacagttagtgaacttggcatccctcgccgcaaacgtgtataccatatgcaccgtacataagtactttctataaaaaataaaaaagattctttccatcagatgacaaaacagatctgattgctatatcgttaagaaaaagtacaaagtttgatcgaaaacaaaaatgaccacacatatacagacagaagaaatactttgcacacttgcctgggcgacaaagataatactgatgtgtatttttgacaaaaaaaagaaaagcgagggggagaaagtcaaacttttaagtcctcaggcttcttgtaaactgcaatttgaatgtaatgcttaacag

SEQ ID NO: 409 - DNA, 673 bp, Hippoglossus hippoglossus
tcctctacattagcggtcgaagacgccgcttcagaaggaggaggatccgagctgtgagcggttatctctgtaaaaacagatgtacaggtctctgtgacctgctcgatctcttcctgtgattctggttttaggttggagaagaaccattctggatcttaaatttaaacggtgctctgatctaggaaggtctctgcctcaggtgttaaatcaggttttaactcggaggcagtctgctgacatgtcccttctttacggtgttgttgccaaaattccaggctattgaaaagctcatcacagtccccacattggtagaggatcctaggctggtctgctgtcactgttgcatcagctgcagtctggctgagttcacttttatcaatttgaacagaggatggtccttcttggacttgaatctgttgaagtgaaactgtccttgatacatttaatagcttttgctgcaaagagaagggaggaaagaggaaaaacagggattagcttcaatttctctatgcaaaaataaaacaactcggtaatattaatcaaatacctgttaagtcacttccacctgctgtgtttttctttaattttatcctatctggcagatagggaatgagaattgagtgccggggtactgaggtcaattagagcagcgtgtgtttagagccaaggttcc

SEQ ID NO: 410 - DNA, 356 bp, Gadus morhua
  misc_feature 322, 330: n = A,T,C or G
tttttaacagtaggtaacgtgtttacgtgggtgaataatttaactgtttttcaccactttactatctctcttgtaaaccaatccttgcagacatttggaaataaacatgtcctctgccgttgtcccatgtccattgtgacaacattgggcaatgttgccgtgtcatgtttttgctggttttgtttgggtattgtgtatcattgtgtgtgtgtgtgtgtgtgtgtgtgtgtgtgtgtgtgtgtgtgtgtgtgtgtgtgtgtgtgtgtgtgtgtgtgtgtgtcactgagctgagccaaatgcctggggggatcctctagagtcnacctgcangcatgcaagcttggcactggccgtct

SEQ ID NO: 411 - DNA, 384 bp, Gadus morhua
  misc_feature 116: n = A,T,C or G
tctctctctcgttctctctgacatgcttggagggtacattgcagagatccgtctgctggatcaaacaaggtctaatccataaatgtgttaggttaataacttaaagagttgatttncagtgtgtgtgtgtgtgtgtgtgtgtgtgtgtgtgtgtgtgtgtgtgtgtgtgcgtgcgtgcgtgcgtgcgtgcgtgcgtgcgtgcgtgcgtgcgtgcgtgcgtgcgtgcgtgcgtgcgtgtgtgtgtgtgtgtgtgtgtgtgagtgtgtgtgtgtgtgtgtgttcgtatgcgcgcatgtgtttgtgtgtgtggaactaagggaacggtgagaggaaaggaggacaggatgatgacaggctagcgatgcagaagatcatatccgtgtc

SEQ ID NO: 412 - DNA, 338 bp, Gadus morhua
agacatcgctttctcacacacacacacacacacacacacacacacacacacacacacacacacacacacacacaatgaagaaaaaaacatttacctggcaggaaccagtgttgctcaactggaatatccctgtttctttatatatcctatctgctatgcatttcaaaatacatttgttgcattggcagaccttatcaaacgttttgctagctataagatttgtttatatatgtaaggggggggggtcctgtttaaatataggtgtgaaatctggacagatggttcagtcgagtttttttttctgatattcattaaaagtgggataaatgtggtcgcct

SEQ ID NO: 413 - DNA, 299 bp, Gadus morhua
cacacacacacacacacacacacacacacacacacacacacacacacacacacacacacacacacacacacacacacacacacacacacgttgatctttctattcatctttcccactgggctcttattcacagggagtcacggcgcgacagagcgacacagtgaacattcgagagagggaaggaaacccaagaggtcctttggctgacggattaactccaaccgcggcttttccacctgctgaacaagaactgaagacaatgagcggcggctaaccacgttagtcgctcacaatgagat

SEQ ID NO: 414 - DNA, 471 bp, Gadus morhua
gccctgatcgccatgacgacaaaccagacacaattaccttgtcacagctgcctgggaaaaatattgtttatagataaataagaattgaaccacaagggcgtttatcaaagtcgggcttgagtgaggagggggggtgagagagagagagagagagagagagagagagagagagagagagagagagatgtatatgagaaatacacaaatctatatatttattatacttttggactgaatgcccgttccacaatgtgactttacctgtttactgccggcagtagaggggagaagaaaccatttttattcatgcgcagatgacaaacgagcaggtcaagcgaatcagaggtcaagtgaagtggattactttgttgttttttttgccgtatgagtttgatattcatatttcgtattcgccgtattaactgcccggttcaaggacagagacgtaggggaggggcgaatacgattgca

SEQ ID NO: 415 - DNA, 138 bp, Roccus saxatilis
  misc_feature 134: n = A,T,C or G
agcaaccaagccagaaccaaacctgggaagttcaatagtgtgtgtgtgtgtgtgtgtgtgtgtgtgtgtgtgtgtgtgtgtgtgtgtgtgtgtgtgtgtgtgttaacccccctagcaagcaggacgaaaccagnatcc

SEQ ID NO: 416 - DNA, 635 bp, Roccus saxatilis
  misc_feature 243, 290, 526, 588, 590, 635: n = A,T,C or G
atctgcaaataagttaatattcacgcttacctacaatgatatctgtagcatttatatcagattatatctacaaacagttttattgttaatgcaaaagggagcagggattttggtgtgtgtgtgtgtgtgtgtgtgtgtgtgtgtacctgtgctggaggcatgatgtactgctggatgtgttctccagtaatgtgctctggttcaaagctgtcatctgcaataatgacttctatgttgctatanaaactccggatgctattcaacaacaccttgagttgtctgtagcgcangaatgtctttgtcgtgatggtgacttgcgagctgatatctgattgagttattaaaacaaaaagacaaggtgataagacacagtgtaagcagaactgtcatgtcatggggaaaagaattccattgtcaaatatctacctgttcccatgtcgtataggactggcacctgaggctgtttgatggtaatgggaaacacagcttcatgcttgtcaaaactggaaggaggctgagtcagaanaagacagtcaaggggtggtttaccagtaatacattacttaattctgacatttaaaaaacaangngggctaagacccccagtgaatcttgcctgtctgaaacacacaaan

SEQ ID NO: 417 - DNA, 629 bp, Roccus saxatilis
  misc_feature 4, 10, 395, 407, 413, 445, 450, 451, 482, 495, 507, 510,528, 541, 545, 553, 558, 588, 590, 595, 596, 599, 614, 617, 621, 622: n = A,T,C or G
tggntctggntcttcatcctctgggactctgtttccctccagctgtggaccagcagtgttagcatgttagctccacttcactaattagcactcctggctaatcagctccatgttactgttcacctgccacacacacacacacacacacacacacacacacacacacacacacagagtcacttcaaagactctcctcctcttcatcatccgttttcctcttcgctccagtttttcttttcatctcgtcttcaactgctcccagcaggtgttcacactcagaaaagactttaaatgagattactgtacacactgtacgtgtgtgtgtgtgtgtgtgtgtgtgcgtgcgtgcgtgcgtgcgtgtgtgtgtgtgtgtgtgcgtgtgtgtgtgagcccanccttaagctctntgtctncatggtaacacaacccaaaggagaggggaagngagtnntgtggttaaaaagagaaaacagggatttaanagctgatgaaaanatctgtctgtgntgncccctggggggggagggncaactaccccacntttntttacagngcccntaatcaataatgggttggtgaaaaagaacncngatanntcncttgggcaaaagttntgntttnngggggtt

SEQ ID NO: 418 - DNA, 630 bp, Roccus saxatilis
  misc_feature 420, 510, 534, 630: n = A,T,C or G
ctggttagtcctgtacgtgtttgtctcctctaaaagtaaccaaataccagtctacttgccactcttgaataactctctgaccgactggactgctgagaaggttgtgcgagtgtgtccagattcatatgtgtgtgtgtgtgtgtgtgtgtgtgtatcaaacagaagagaaaatgctaaaagtcatgcaagacagcggaataaagctggaatagcaacaagggagaaactggatggcaatgaagtgagtgaacagacaggttattggcagcagagggaaagtaaaaggctggatgtccattgaagacgtagatgaaggaaagagaaggtgcttttagtagctaaaaggagaggaagagtgccagaaatatataaactacacagtttaaatgttggtaacaggggaaccacagttagagaggnttatgttcatccttaatggctctttccctgtaacccatagtggaccaatcttgaacttggcttcttataaatcatcatcatctgaatcanaagttagtgataagtgtctttccnggggggtggtctctccaaaaaaggctttattttgtcacatgggccattacggcatttaacgtgcatggccggtccttaagcaagctacttggctgn

SEQ ID NO: 419 - DNA, 634 bp, Roccus saxatilis
  misc_feature 286, 367, 386, 507, 510, 515, 552, 595, 606, 626: n = A,T,C or G
tgaataaatacttcgtccaccactggaaccgcgctcattcacattaacattcatacagtagctgcaggagacatatggccaattacactcaaccatttcctgctctctcactcacacacacacacacacacacacacacacacacacacacacacacacacacacacacaaaaagagctctcatgtaaacagtggcctacataatacacactgtctttcttgactgctttctctctctctccctctctgtctgtaaatgggtcagttgagacagaccactggtcanacagacttggcacgggtccgtgtgtgtgtgtgaagttgttaaattctttgagagctttgtaatggggtgtgtttgtgaacnaagctttcttgttgacacnggtttgctgtaactgcttactagtatgaaaataaagtggaggaagcccaacgggggacaaactcatcacaacttttaaaatgtataatactggggtagaaatgtggcatcaaatctagganggncacangaaaacactctgaaaagaaaacagctaaggcaatggntattaattctgagaccagaatatcatacatactgggtgtgggngtggggggggnctgtggctgggctctgtctnttaaaacc

SEQ ID NO: 420 - DNA, 669 bp, Roccus saxatilis
  misc_feature 113, 155, 202, 212, 220, 315, 342, 344, 364, 392, 393, 487,492, 500, 507, 530, 535, 538, 550, 560, 561, 580, 588, 621, 652, 653, 657, 669: n = A,T,C or G
cagtttctcacttaaggacatctgagtgtgtggcagaagctgcagcacggattgaatgctgccctgtgtgtgtgtgtgtgtgtgtgtgtgtgtgtgtgtgtgtgtgtgtgtgngcacacatgcacaaactgaacatagaagtgaaagtgatgtgngagcagctcttcaatatctgactctgccttgtttccaacagagatanacctctgcanaaacacangattctctagtgcagtttgcacaacaccagggcatgtattaattcactctgcacaataaacactatcacaggtcctgaatgtttgggtggatggntcctgaaataaaacacacaccccctcngngagtgttacacaagctgttnttgaagcatggaagaaagtcaaagtgtnngaggaggagcgaaacgcaggacagagagacagagagaaatgcgtgacatactgtagctcactgccccactctttttatggctcttatgaaacanactgngtatatcntggtggnatttttcacatttatacccaccncacanaanagaatttatccntccccttganncccataaaatatttaaggnggggtccnggggaatgggacctaaaccaccaaaaaaacccnttcaaggaaataaccatcaattttcaaaaannctgncattcaagttcn

SEQ ID NO: 421 - DNA, 450 bp, Roccus saxatilis
  misc_feature 280, 290, 300, 302, 308, 312, 315, 319, 321, 322, 323, 325,330, 331, 332, 333, 334, 339, 342, 345, 348, 349, 351, 354, 356, 358, 365, 366, 367, 372, 373, 375, 381, 382, 384, 385,386, 387, 388, 389, 391, 394, 397, 402, 404, 413, 418: n = A,T,C or G
  misc_feature 428, 429, 431, 432, 434, 435, 436, 437, 439, 440, 442, 445,446, 448, 450: n = A,T,C or G
aaagacaagacacagcctggccaactaactggaactgtgagcctggaagctttatgtgtgtgtgtgtgtgtgtgtgtgtgtgtgtgtgtgtgtgtgtgagagagagagagagagagagagagagagagagagtgtgtctgcatgcacacaaagagtgagaatattcactatgagaggagatatttgttcagccggggaatttactgatgagattagctctggttagggggtttgggggtgtggaatgtaaacaaaaggcaagcggagagaaagactttangagaagattnggcacccccncncccccnttcntgngcancnnntnacagnnnnnttttnagnttnctnngngtntncntaacaannnccttnnanggccanncnnnnnngnctngtnaaccntnttaaagtgnatttntgaaacattnngnntnnnntnntnaanntncn

SEQ ID NO: 422 - DNA, 635 bp, Roccus saxatilis
  misc_feature 596, 600, 623, 629: n = A,T,C or G
ttgccagagcagctttgcactctgaatgtacaactgataatattggatttgtatgtttagcattagaaaatagttgctttcaaattatgcatttgctccataagaccgcattaataatggagcaggctggtatctgccatttgttcttctttgttcctcttgaaacgtgacatcaattatgtatcaccaaaaaattgtgaattaaatacaatgcatatttttctttgcagtcaaaagagaatgtccgatgagaaaattctttacggatatcagaagaaatactaaatgattctgttacttgaaaataaaagttgaaagtccagttgggttggacagtcgagacaagcttggcttcagtataaatatcatccagtgtgacctcggctgtagagctggctctggccctttgttgaactaaagcttttagcaacacagtaggcatgtgcacacacaaaacacacacacacacacacacacacacacacacacacaagatacacgtgtgcaggtagacacgttgcttgaatgtccattactgacttactatgccattactgtgagaactgatagcacggaatactggtttattgctctgnctgnaatttatcctcaaatcagagaanagcttntggaag

SEQ ID NO: 423 - DNA, 774 bp, Roccus saxatilis
  misc_feature 79, 417, 457, 538, 541, 549, 552, 584, 618, 631, 634, 643,659, 660, 690, 710, 722, 727, 732, 751, 764: n = A,T,C or G
ccatagcttggcaacttacataaaatgtttaagtagtttagtgaagagaagaaaatatgattagttagagtaccatagnaatatagtaaccatgggcatacacacacacacacacacacacacacagagaactacacgcacacacacatacacaaatataaacatttacacaggcccacacacccatacacatatgtatacccatatatccaatatgtatagcttcctcactattcgttacaacgttgtgtgtctgtccgtctggtttttgtgctggtttttgccccttttttattagaaatcgatccattttgtgcctgcatctcacgctgactagcggagctgacgtaacctggctgccagcgtgcactgcagtcaaatgtaaacaatgccataagcaggctgcatttgccaggnttcacagtgccccctttaggaaacaccattaatgaaaggntaaaaggagaaagtgtaaatgcagtgcagtggtcactggtatattttatgttagccggcattttggaaaaaaaaatgttanttnggcttggnggnttaacccattatttggggttattaaagccttnaccccattggcgggaggccccaccccaatttttnaaaaggccttttngancccaaaggncccccccaattggttnngggcttttcggccggaaaggcccccacccncccaaatttgggaaggtttnttttttttttgnggggnggggntaaaaaagggggggagagntttttttttttanaaaaacgcgg

SEQ ID NO: 424 - DNA, 671 bp, Roccus saxatilis
  misc_feature 536, 538, 552, 555, 581, 593, 599, 612, 628, 644, 654, 655,658, 660, 670: n = A,T,C or G
ttttgcccttcataatagtcgcagcacttgtcattcccagtgaactctgccccctgtactccttccaacatatcccaatacacacacacacacacacacacacacacacacacacacacacacacacacaaacacactggtgagcgagttgactgcggagcaaaaagtggcaggagagagtggcattgggaacgtctgtgccagttgcctgccgacggcacctttgggattggtaaagtttgatttgatggctttccctgttaattagggtttggaggtgactcctgaaatggaaatgggcaaaatgttcaaaaaaagatgtgccaattcccacaccccctccatctccaccttccaaaacatgtgacccatatactggagtacctagtgaagaaagtagaacaatcaagtcatttgaagttataggccactctgtatttgtgtttttctgccaacgtaggcagggcagttcagtcaaactaataatgtgaaataggctaaaacttgtatgtgaacaaaagtcaaccaacaaaatntngggaaccaaagaanaanaatggtttggttcttttaattaattngggccatacatnttttgnttcaagccttttnaaaatttacattgtcnaaggtaacaactggtnccccttgttnnttntngaaaaaaatnc

SEQ ID NO: 425 - DNA, 659 bp, Roccus saxatilis
  misc_feature 614, 628: n = A,T,C or G
atttagttggttgaacagatgcagataatggtgcactcgctacatccctatattgtacagattgtaagccctttgatgcaaatttgatgcaaatttatttttttaatttgggtaataaaattgacttggtacttaagagaatgtatttggatgctctccaccactgtgtttcaggagctatattattctgaagttaagtaaccaatgtaataaaaggttgagagaacagagacaagccatagagacaggtccacctgcaatgacctcagtcctcccactcacctctgaaccttctcctgaggatttgtcaaacatctccagcgcagtaatcacatgacatttacaactgaacttctttcaccagtatgaataacaccccacacacacacacacacacacacacacacacacagtgagacacgtaattaattacagtaacatatcgtccagtagaaaggagtgacttttaaggttgactgtttcagttacgttgtcatgctgtgctgtggacttttcacattcttcagacctttctgtggagagaaccccccccttcgcaaaggtgtcaaaaagattttcccagcccgaggcacattaaaaatgaaaccaaaggngctcacccaacttnccaattagctgaaagaaatttcttttggaat

SEQ ID NO: 426 - DNA, 627 bp, Roccus saxatilis
  misc_feature 419, 487, 531, 540, 548, 557, 563, 571, 582, 587, 592, 617: n = A,T,C or G
attcggggcaacctggaaaaaatttaagatgcactgtttgcaaatgacctcgtgacaacatatgttgacacgacttgtcacatatgttccttaaaaggtgttgcgtgtgtgtactgcacataacacacacacacacacacaaacaatgaaagccatgtcattccatggaaactgttgctgttggttccaggaagtgagacaaaccagatacaggaagtgaacggccacccagtcatggtggaaactgggggtggaagctaagaatactgcagacctgtgtacgtgtgtgtgtgtgtgtgtgtgtgtgtgtgtgtgtgtgtgtgtgtgtgtgtgatttgtgaacctgtggtctgcaagaaaagaatcacatcaggaagtgataaaaagtctgaaaggacaattttatttttctgtttttnaaaaacatgtttaacttgaagctgtttgttggtctcccgctcttattggtattttatatttcattggnacatgaaacccatgcctgctgtaaatcaccacaacatcccagangaattgttnttaggtgncaggttggncctcgnctgctcantttggagcccnctcanagagngactgttttatttaaaactttcccnaaataactgt

SEQ ID NO: 427 - DNA, 732 bp, Roccus saxatilis
  misc_feature 535, 601, 605, 607, 626, 662, 670, 677, 681, 698, 719, 720: n = A,T,C or G
tgctgtagcgcggtaacactcattgtgtgtctcacacacacacacacacacacacacacacacacacacacacacacacacacacacacacacactgaccacctaattttggaaactcttttggaaacgctgtcatccacgtgcacgcgcacacagacctgtcccacataatgagctgcattatctccccatctgtgtttatgctttatttgagctcatttggaatcagccagctttttatttagggcttggcttattagtggcagtgtcgagatagaagtggttggatggtatttgagtcacctgggaaattatggataagataaagctacctgcttattccttcggggggaaaacacacaacacattacagactgtattaactggctggatgacggactaggacgcagagaaaggcagacaggaaaagatacagatgtagtagtagggctacacattaaaagcattaattacactacacaacattaaaaactttattattggggagtccccctattccagggaaatattttgnggaggtcttatggttaaaaaaaggcctcctcttctttaataaggcccccaccaccaccaatggccnggcnangaaaaccaaaaaccccccnccccccaaaaaaaaccaaggtttttaaaaaaaattnggggggtnaaaattngggnccttaccttaaaataangggaaggcctttttcccgggnncttttttaattt

SEQ ID NO: 428 - DNA, 665 bp, Roccus saxatilis
  misc_feature 41, 115, 178, 304, 310, 331, 335, 385, 397, 406, 461, 468,471, 476, 483, 488, 489, 511, 518, 521, 530, 546, 557, 566, 576, 577, 579, 583, 585, 586, 597, 599, 600, 604, 605, 611,612, 613, 618, 627, 630, 631, 643, 653, 656: n = A,T,C or G
ggggatcattaaaataaaccaggtactgatttctgaatcantctgatgtcctgatggttcagagggatgaagtgtgtgtgtgtgtgtgtgtgtgtgtgtgtgtgtgtgtgtgtgntgacacctgtcatgcatgcactggtaatcttgctttgctgtatactgacacactcagatcctntagagtcgacctgcaggcatgcaagcttggcactggccgtcgttttacaacgtcgtgactgggaaaaccctggcgttacccaacttaatcgccttgcagcacatccccctttcgccagctggcgtnatagcnaagaggcccgcaccgatcgcncttnccaacagttgcgcagcctgaatggcgaatggcgcctgatgcggtattttntccttacgcatntgtgcggtntttcacaccgcatatggtgcactcttcattacaatctgctctgatgccggcatanttaagcnagncccgnacacccnccaannacccgcttgacgcgccctgatnggcttgnatngctcccggncatccgctttacaganaagtctgtganccgtctccnggaagctttnntntgtnannaaagttttgtncnngtcnntcaccnnnaactngcgccgganaannaaaagggccttngctgaaaacntcnttatttttt

SEQ ID NO: 429 - DNA, 624 bp, Roccus saxatilis
  misc_feature 514, 524, 539, 549: n = A,T,C or G
tttgaaaccgggcacccaactgctctctttctttcactctccctctctctgaattgtcaacctattaaatgtctctttgtatctcgcccattcacacacaaactgaccaatggaaagctttggaccctttcagtgacagggtgtgtgtgtgtgtgtgtgtgtgtgtgtgagattgtcataacggagctgtcccagttctttttgtacattgattgcaccaatgttattttactagtttagaaagcagatgtcactgcatgtgtgcgtgtgtgagagagtgtttgtgaatgagactgacagagactgtgagggtggtgtgtatgtggtagagttacatgaagaacaatagccttattgtacctgtctgctgctactgtctgtcttgtgtcgatgctctgcactgagcctatttgcctcattctttgtgtaaccgatcacacatttgtgaataaagttcgacatttctgagttatatcatacacttgtaagctctctggtggcttaagtggtgcanggttccccantgtattggaactaantatcaccagnggatgttttctaccaacactggcttcgactattattcagtattgctcttgcatttaacactacatgggcgaacat

SEQ ID NO: 430 - DNA, 672 bp, Roccus saxatilis
  misc_feature 579, 599, 656, 672: n = A,T,C or G
caaatctaataacggctccactctggttattggaatgctcgccacacttacctttgcacactttgtgtcacacacacacacacacacacacacacacacacacacacacacacacacacacacgtagactgaggtatatacttactctttattcagaaaaaccttacttagcactctctttcaaattatattacacttactgtacatcacatgtgaacacatacagtagtgctgtaaattgatttcagttaaccatcatgacagtgttttttaatagagaatagtgggaaactgtaggttaaacatactttagggttgagaatgttgtatgtctgacgtctcacatcctaataccagtcaacattagtggtcaaaaagagtgttactcattactctgaagagacacagagtaaaatgagaagtagagcactaggcatgaagtgaacagcagggagcagcaatagaattgtgcaaacattacattgcctgtgtttggtcagagagcttctggtttcatatatgttggtgtaacccggatgctatcaacggcagtccaagctaccaggtgtatctacccangtacatttacttattgctgncatctcttcagtctgtccctatgctaatatggtctattgtgtaaaccggggcctttnggcttaatctaagtcn

SEQ ID NO: 431 - DNA, 500 bp, Roccus saxatilis
aggcgttgtaaatcagtcacacagctcccatgtcactggagatactggaaatgactccacttccagtcctcagcgtcctgcccatgtgattgccactttaaaagacatttgctttataatacacttacatttttttaaagattcattttcagactgcgaactgtacactggcggcaaagggggggctttgtactgaccttgacaaaaaacgcccaactaattcatcttttgctctcgaacatcaaggccgatgaactgatagcgttttattgctggcaataacaatatcacaccgatggcacaaggtcccattacatcaccgaattcattcacagcttaactgactctgtgtattccagttacacacacacacacacacacacacacacacacacacacacacacacacacacacacacacacctgtagttgcccttcttgcggagctgctccttgaaagtggcccagggtgagactgtggctcttcatggcctccggta

SEQ ID NO: 432 - DNA, 671 bp, Roccus saxatilis
  misc_feature 399, 476, 555, 643, 645, 648, 668, 670: n = A,T,C or G
aattaactattaatatagttacagcggttgtgcatgggagtttcatacctagtggaaattaagagcttatcacactgcacaggtgtgtgtgtgtgtgtgtgtgtgtgtgtgtgtgtgtgtgtgttgtttgtttgtttgtttgtttgtttaacagctgttcaggattttattttgggtgaaatgcatgagtctgttttttatgtaccatgtaccctgtgttttcactgtcctaccacaactgacttgtcttatcattaggacagggactcgggcaacaaagtctgcattgtggtttttctctttacaccagtgctagcgctacttgtgtcaaagccggggcagattttcaaacattcctcatacttgctgacatatttcttcatggtttgctcctgtctncattgcgctgtctgactcaatttcttcacccgcccttttcttagcatgcaaatgtgtgttttgttttagtgtaaaangaaagcgtatgctcactggttaacacgcacaagctgaaggttgcagtgcactttgacatgacatttaaaaatcattctntacaggaaccagttggtgtagcccaaatccatcagggccacatacttcaacccggggtagaagttattctgggttatactgcaccatntntanccccgggccattgttttatntnt

SEQ ID NO: 433 - DNA, 667 bp, Roccus saxatilis
  misc_feature 453, 511, 516, 597, 624, 660: n = A,T,C or G
taaatcctcttcacagcgttgtctaattactcccaacaacatggtagctgattaacttgtaattgctgctctgaacgcagcctgtccctctcttctcgttagggttattactgactataattaccgctaatgtgcattgaggaacacacacacacacacacacacacacacacacacacacacacacacacacacacacactcacacacacatacacacacacacacacatacacacacacacacacaacctcacatgtacacaaacagacgtgcaggtggaagctcatgcacaagcacctgaacacacatattcttcttcacaatacactcgtgcacacacctcgccaggagaatacttatattcttggaaactgtgactggtgcacaaagcaataacagtgaaatttaggcaactaaattcattttccgtacgttccctcatttaagtggngggattcacagcagccaaaaaccctttaatggtcttcatatgtcacctcatgtctttnctggncctttaaagccccatcatttaccccaaatcggacattgatgtcccttgagcagtgctgaaagtgaagcctatgacattctncctaccatttgagatttggtaaattgnggatgatgtgaacgtaccagcgtaggctattttctnttggtaa

SEQ ID NO: 434 - DNA, 271 bp, Roccus saxatilis
  misc_feature 2, 5, 14, 17, 19: n = A,T,C or G
gntangaatgagangantncgagctcggtacccggggatcaatttcaatgcattctaaagaccatcatcattaaacgttgtgcttgggtcgtcactgcccgggccctaattaaatatatatcttttattcaatatttatcacacacacacacacacacacacacacacacacacacacacacacacacacacacacacacacaaacgcacaaacaccttgtgttctttagtttagtgcatttagttagattatatatatatattttatgaa

SEQ ID NO: 435 - DNA, 738 bp, Roccus saxatilis
  misc_feature 11, 539, 591, 604, 614, 618, 651, 659, 669, 690, 693, 702,706, 708, 714, 723, 729, 733: n = A,T,C or G
gctgcctgcangtcgactctagaggatcggcacatgtctacaatatcaggtaactgactttgtacttaaggggggcaactgttaaaaatagactcacaccccgagactgccagctctgcctgagctcatactgaagtcctacatcataggtctatatcttcaaccacacggctatgaaaagggtacgtactacatgcatggctgaaaatccccttcaaaggctatgacatctgtactaatacctcaagtaataatactacttttattatgtgtgattcagctgtgagctaacttgtttgacatatgttggtggttttttctttgggcatggtaaatgttgtcaatcacactgctttgacgcttacaacactgatgatgggttgacatgcacacacacacaccacacacacacacacacacacacacacacacacacacactctgctgtgctgcttgacactcatgattcactctgtaaaggcatcagaattaattccacatgatttacaccgtgtaatgaattttgacaaaatacttgnttgtggttttcacccctggtcatttgcagcagtgagtggttgaagaaaaatntttcaattttganggcaggaatngttntttattttttcaaaaaacaagttttaaaaatgntacctggnaattttgggnaatttccaaagccgaagtttngtntccacaatnacangnaaagcnttttaaaanaatgcncccntgggt

SEQ ID NO: 436 - DNA, 712 bp, Roccus saxatilis
  misc_feature 331, 362, 369, 374, 384, 387, 395, 403, 405, 407, 410, 416,417, 434, 436, 439, 442, 447, 451, 453, 457, 459, 461, 465, 466, 468, 469, 472, 476, 479, 486, 497, 498, 508, 510, 514,515, 516, 518, 519, 526, 530, 531, 535, 539, 543, 550: n = A,T,C or G
  misc_feature 551, 554, 559, 560, 564, 566, 570, 571, 572, 573, 575, 585,589, 590, 591, 593, 595, 603, 604, 606, 607, 611, 612, 622, 627, 628, 629, 631, 632, 633, 636, 639, 642, 647, 648, 650,651, 652, 653, 654, 657, 659, 660, 662, 664, 665, 666: n = A,T,C or G
  misc_feature 668, 669, 672, 673, 674, 676, 678, 679, 680, 683, 684, 685,687, 689, 690, 691, 692, 693, 697, 698, 706, 707, 708, 709, 711, 712: n = A,T,C or G
gaactttaacctttcccggggatcttgatcacactcggagagatgacacatggttactgtaaacatacaagctacagtaaactacaattcctgcacacacacacacacacacacacacacacacacacacacacacacacacacacacacacacttattgtgcagcctgcagcgatgcacaaaatcatgcactgaccttcacataaagactccaggggtgtgcttttatgtgcactttaaagtgtgtatattaaggctgcattgcattaataagatgttgtgtatatatatgtatggagagagagagagagaaagagagagggggtgaatnagaggaatgttttccgtctgccattattacnccatgtntgacngccagcctgnctntttctctntctctctnanancanccaggnnttctgctcccctttttntnctncancaatntgtntntctncntncctnnannctncctnttnttttttntgggaactatnnccacattctntntgannngnncttcgtntgcnnccgnattncctnttttatnnatncattnntccntncccnnnntntttttttttntggnnntncntttatttnncnngctnncctttcagantttgnnngnnnaanttnttnccccnntnnnnnctntnncntnnntnnttnnntncnnncannntngnnnnntttnntttctttnnnnann

SEQ ID NO: 437 - DNA, 710 bp, Roccus saxatilis
  misc_feature 2, 11, 78, 516, 564, 587, 602, 638, 647, 674, 691: n = A,T,C or G
gntacgaattngagctcggtacccggggatccctgtgccagctctctgttctgtgtcactattagagagcccgctcanagtgaacacatcattaaacctcaataaaaagcctttattcacccccaaattattacaggaacatgtgtgaaccaagcgggcaagagagtgtgtgtgtgtgtgtgtgtgtgtgtgtgtgtgttgagagaggcaagttgtaaatgagtgtgtgttagtaatgcacggggaaagacggacagagagttcacaaagagtactgtattgctcatataaaagcctttgtattttgtaatattcttggaagaagcatgtgggtatgtgtgtgtgtgtgcacagtggttggtccagtcatgtcaatgtaatggagcatgatgacttgttactgtaggtgccagggaaagagagaaagacggagtatgatgggaagagaaacctagagagacacagtaacaccagaaaatgctacagcaaaactcatccatgtgtgaaatactttgntttaagatgcttcggtgggatggttgctacacactgggctagttttgnggctaactactaaaatgccatanaaatacaaagcttgncgcatttcaagggtcttgacctgtacaaaatactanaaaatgccnattttctgtgctggcttttgggatgtnctattgaaagaaatgtnaaaaaaaaaaaaaaaagcc

SEQ ID NO: 438 - DNA, 712 bp, Roccus saxatilis
  misc_feature 4, 16, 19, 36, 535, 542, 591, 597, 608, 632, 638, 652, 655,668, 680, 692, 703, 705, 708: n = A,T,C or G
atangaatgagagctnggncccggggatcaaagcanaaagtctgacaagaaccgagaaacctctgagaaatatatgcaagcaagcatgcgcgcacacacactttggcagaggactgcctgtcagaatgccaaagaaactactctttgagctctccataaatttactttgaaggagttctgactgggtaatagcttgtatggaaaatactgtcacaagagaaaatacacacacacacacacacacacacacacaaaacacacacacacaatctcaaagccccttatttataatcgcattcgtgacaaaagaattggaaggaaacacagcaccactggcattaattaaagagaatcatattttatgaagcaattctcaggaagtaagtgcagcactgaccctccagccccaccccagacagacaatgtcaaataaattaacatttaaattagggcatagaccagaccagtctgggctaggagcaacatcaccctactagcaacccgccttagcaacccgtaagtaggcctatagtgntggcganggtactagagcagaactgggccttgtacaatgctgaaaacacacacacncacccnctggtttctgngggtataccgtgccctgtcctggngggtanggataaactttttnatngggggcaaacatngcagacccctanaccttggggggngtaccaacggngnggncctt

SEQ ID NO: 439 - DNA, 660 bp, Roccus saxatilis
  misc_feature 497, 518, 537, 572, 615, 617, 625: n = A,T,C or G
atcttttttatatttgagtcaaatttctgcaatgtcaggtttctgaggaaatgcggtatacaagtttcagggcatgctaggagactaaatacagagaggggatgcaagtgtgaaggggaagaattgatatttaccacaggcaatattatcagcaattgtgctgtatgtagtcacacattttctcaacacacacacacacacacacacacacacacacacacactgcgctcaaacaccatatattcaaatctgtcatgtgccaattcttgtttctatgctatgttttcatccgtgtctgtgcatctgtataaagcactttgtaacactagttaacaaaaagcgatctgtagataaatctgccttgacccactttgttttgctattttcatttacactgtgcaagtggaagcatggtggagcacgcaggagtgtatcaatatcaggacaaatgcaatgcaatgaaagcagcttgtagggtcaaatagctctggtaacangtctaattgaatctgtgtcangttctcagtgcaggtcatncaccactgtatgcacaagatggaaatcaatatgtnctctctgaatcatgggacacagtctaatttcattgaaggcttntntttttttnttttgtacatgtgcaggttaatgaaaggcattgtt

SEQ ID NO: 440 - DNA, 714 bp, Roccus saxatilis
  misc_feature 1, 5, 7, 9, 12, 14, 15, 17, 21, 22, 32, 39, 48, 49, 50,51, 57, 58, 63, 80, 89, 497, 534, 606, 667, 668, 675, 682, 688, 689, 702, 707, 710, 713: n = A,T,C or G
ncagnancnacncnncncggnncccggggacngctcttnaagacacannnnagaatnncagangacacgggggcaacacngaatattanaggactaacatatttatcctgcctccaacaaccaaaaacacacacacacacacacacacacacacacacacacacacacacacacacacacacacacaagcagaaacacatgcatacaccagccgccctctcatccctcatctgcccagtgcagatcctctagagtcgacctgcaggcatgcaagcttggcactggccgtcgttttacaacgtcgtgactgggaaaaccctggcgttacccaacttaatcgccttgcagcacatccccctttcgccagctggcgtaatagcgaagaggcccgcaccgatcgcccttcccaacagttgcgcagcctgaatggcgaatgggcgcctgatgcggtattttctccttacgcatctgtgcggtatttcacacccgcatatggngcactctcaagtacaatctgctcttgatgccgcatanttaagccagccccgacacccgccaacacccgctgacgcgccctgacgggcttgtttgcttcccggcattcgnttacagacaagctgtgaccggttcccgggaagctgcatgtgttcaaaaggttttcacccgnnttcaccnaaacccncgaaannaaaaggggccttngtganacnccnt

SEQ ID NO: 441 - DNA, 664 bp, Roccus saxatilis
  misc_feature 587, 640: n = A,T,C or G
tcagttcagccacagactgactggcttttacagttttacgtgtggtttaagtgttgtgttatttgtggtcactggcattttctaattcacattaaagaaaataaaaaaagttttttttgtatcctttatgaagaaaacttcctataaataacatttcagaccctattccaggactcacacacacacacacacacacacacacacacacacacacacacacacacacacacacacacacacacacacacacacacacttttgattaatgctgtgatgcatcagaggttacttacttctaactctactcaaggtaagattgaagtaaacaacctcttatttgtttttgtttcattattcaagctgttccctattttccccagataaaatcgattaaaaaaagcaaaaggactcaaggctgccgagctctttctgggaaaatcagtcagtgtttccgttcagtgggaagtcagagaaatcaaaatcaattcagcaacagagaatgccctttataatcgcattgattggttcctgttattctcacttgaattggacttctctctctctctttggctcccgctctggttggngacttacacacctttccacacaccccaaacccccggccagactgttaccgtanccaaacatgggtatcttcattaag

SEQ ID NO: 442 - DNA, 664 bp, Roccus saxatilis; identical to SEQ ID NO: 441
  misc_feature 587, 640: n = A,T,C or G

SEQ ID NO: 443 - DNA, 659 bp, Roccus saxatilis
  misc_feature 338, 386, 407, 455, 459, 463, 526, 542, 557, 602, 609, 633,648, 659: n = A,T,C or G
tatcacgcctgagttatgcaatatcacacacatccacacgtacacacacacaggcagaaatcataacagtgatggtgacggtgatgcaagagataaaggagcagtccgcatattacagcatggcagcaggtcgacaggcggtgacagccaggagagagagagattactggaacacacacacacacacacacacacacacacacacacacacacacacacacacaatctctctctctcacacacacatacaggcactcagaaggtgagatatgtctcccagcatagagatgtactctgctgtaatctctttgtctacaagatacacttagatggatggntacaggacacagagagggtgtgtgttgctgcgtatgccgtacgtccantcttcagtctgataaacccanagccacattttgaaaccattttaatatataagttataagttaatatgntggnttanttctatatttgctgggtttaatatttttaataaatcttggggatttccttcaagtttctcttntacaatactcacctgncatatggcatagtantgggttttacaatatacaaaatatgctctttgcgggcgggaaatngttgttnaaagctgtgtttgatccccgggtncccagctcgaattcntaatcatgggn

SEQ ID NO: 444 - DNA, 423 bp, Roccus saxatilis
  misc_feature 349, 362: n = A,T,C or G
aatggtgtcctcggagagggaattacacagctgaatttcgatgagaacagaagaaaggaagaggaagggagaacaagcagaggcggggaaggcatgtgaaaagggagagagggaaggaggatagtatatccttcaagaaagaaaaaaaaaaaggagaaatgggaggaatgtggaaaagtatgtagaagactggactggagtgtgagtgagcctcgcaagacttgatgctaaaaacacgcaaaagaatttcaaatgaaaatccttgaaaatgaatcctcacgagtgcagtttggggtgtgtgtgtgtgtgtgtgtgtgtgcgtgtgtgttgctggactgagataacatcnatatctgtgagcntttggcccataatttgtgctgacaagtgaatgtctgtgcctgtgtcttatttggttgggat

SEQ ID NO: 445 - DNA, 371 bp, Roccus saxatilis
  misc_feature 153, 158, 168, 172, 196, 200, 211, 308, 332, 347, 359: n = A,T,C or G
cctccccaaagcacagtgattaaaacccactagagaaactgagacatacccagagcggttgtagtcaggctctatttacacccagtggattacttaagtgcgtgcgtgtgtgtgtgtgtgtgtgtgtgtgtgtgtgtgtgtgtgtgtgtgtgngcgcncatatgtgtntgcntgcttgcgtgtctttctcctggcnctgnaagacccttgngccctctccaccatgtcgcagctgtcatccaatcacagagggcaaagagctaatcacatgaccccagagtagagttggccgtgtcactcgatgccgnctgtatttgtgttgctattgccangacatgggtatgcanacacataaaagngagacgttctca

SEQ ID NO: 446 - DNA, 397 bp, Roccus saxatilis
  misc_feature 89, 191, 219, 250, 264, 275, 329, 377, 385: n = A,T,C or G
tagtatgtagcatctgaattagtgctcactcacacacacacacacacacacacacacacacacacacacacactcgtaatgctgaactngggtccatcgctgcccttcatggtgcattgcattgcagagaggaagggaggtgtgtatttgtgtgtgtgtgtgtgtgtgtgtgtgtgtgtgtgtgtgtgtanacagtgccctcataaataatttcactcnatattgcttttaaacgatagcatcccacggntggcccgccgcggngtgcaactcgnccataaatgatactgtcagggctaatacacggcttccattattaaggaggcacngagcgggtgctgctgcaacgctgcacccttcgcattcactccgacagncggggcancagcgcaacggc

SEQ ID NO: 447 - DNA, 525 bp, Roccus saxatilis
  misc_feature 493: n = A,T,C or G
attgacatctcttttatgtttctctcttttccgatcgcagtcagccacctttcgcttcttacaaaaagagctcacagtgcagtgatgaaccctagtgcttgtttgtccaaatgtcagcagttttgtaaactgcgtgtgtatgtgtgtgtgtgtgcgaacttgtgaaaaaagaaatctctggtgcttgtaactttttgtgtgtatgcttgcacctttttgtgttcatcacatagttgtgggtgggtgtttttggagcagtcacacacacacacacacacacacacacacacacacacatatgcacagtgtaatgtcatgtgcatttcctgtacacttagtctctaatgcagaatgtggtggtaggggaagtctaaatgattaatgattgcctctgtggtctgtctgccaaggctgcagctataaccagtgtcattctctcttactgctgtcactccatgaatattgtataggttatggacttgcttggcgctgncatctaccactacttgggcatgttttaatcct

SEQ ID NO: 448 - DNA, 443 bp, Roccus saxatilis
  misc_feature 323: n = A,T,C or G
ctcttactccccatgtcagtgggctaatgagactgacagaatgcaaaagagaagagcttatgtacaatgtgtgtgtgtgtgtgttcctgtgtgcgtgcgtgcgtgcgtgcgtgcgtgcgtgcgtgtgtgactgtgcgaaggtggaggttgcagaaaagtagcctgaaggagggcttaggaatatttcagtattggaggacctctttgactctcactctgcctacacacagacatacacacaccggtcaaacaaatctctattatcaaagtgactctgtaagtgtgtgtgtgtgtgtgtgtgtgtgtgtgtgtgtgtgtgtggntgtcattcatgctcatatgacccatacatcccaatcctcacaggaattcatgaagaattgttggtgagtatggtgcctttatgatgattttgataatctcctgttttataaatctgatta

SEQ ID NO: 449 - DNA, 180 bp, Roccus saxatilis
attctgtagttttgggaagatgaggctttggctcacaggtatatacacacacacacacacacacacacacacacatacacacatatatccactgttcacacccttcacgtcaaacgaagtgagatggcctagatagttagacggggagacaagcagggtgttagagggagcagaaaggag

SEQ ID NO: 450 - DNA, 520 bp, Roccus saxatilis
  misc_feature 46, 48: n = A,T,C or G
gcactgcttttttaacactggtttatagcctgcaggaaccatgacntncccagatgtctgtctgtgtattcccacacccatgcagcaagcacacacacacacacacacacacacacacacacgcacacacacatcttagtgaaacacctagtgaatttatgttcaccctgttctcacttcctcttcttcctctcttccaacagttcagggcttatttctttcacctcctgggagtgtggcaatggagtaaaagaaaagtgagaggaagaaacagggagttgaagggaaagtgagaacgacttgaaggtgtcctgagagcgcttttgctttatggaaaacgctgcggctaatcctctgagtgtcactgcgccctccgcatcctaaataagaacctttgtgcacggtaagtacagacacatctcaatacgtgactatctcagcccccccccccccccttcccgttgctcacgcagccttggaaaaacaaaaaaacactaacaatcaactgcatgagctttgc

SEQ ID NO: 451 - DNA, 471 bp, Roccus saxatilis
ctgctgtgactgacagccttattaccacacactcctctcttactataacaccgtgctgcctacacacacacacacacacacacacacacacacacacacacacaccacccactccctctttttaacctatccaccggcactcttctttgctcacacacacagagcagtctgtcaaacactcttttcttcatcactgtatttccagaagaattaattattactgaaacagaaacaaatatgaattgtctagcaaaggttcaactacagttttttcctacagtctgcaaacaacaggcatttaggcacaaacatactgtacagcagcctgataatgagactttctttttggtttcactgcattattcagatgttgtgacagtcttatgtgcaactgtttcctgtttagggagttactgttattttgtccgtttttaaagtagttatttctggtcagttgacttaaaacaactt

SEQ ID NO: 452 - DNA, 506 bp, Roccus saxatilis
  misc_feature 432: n = A,T,C or G
gagaggttgcagtcgtgctacaagggtgagggcacactggacctggcctggctcaaagtcaaagatattccctgcagcagtgcggtgagtactactaaaatacacacagacacacacacacacacacacacacacacacacacacagacacacagtttacacagtttaatgacagtactggggagatatttactatattggtggttctcttttcttccacacatactttgcgcgcagcatgtaacatgtagtgctctaatctaccagaacagcaggtgtcttgcagttatgtttattaaacccactcatttaggaaaagggtgtttcataggactgtattgaaagaaaagccaatcagtgatgatttcctattgttttaatcatttctaactaagggacgctacaggtgagtatctctgagggaaaatcagnttgtgaaagctctcccacatgttactgtaatgagcttgtgtgcactgtgggaggccttcatgaacactatattc

SEQ ID NO: 453 - DNA, 428 bp, Roccus saxatilis
atcttgagaaaagtaacgattgcctgtaattcaggtctgtgttataaatgaaccaaacatgcctgccctgtgcagctcaaagaatacacgcacgcacgcacgcacgcaaccacgaacacacacacacacacacacacacacacacacacacacacacacacacacacacacacacacacacacacacatactgttagatggtagaatgtgaagccccttgaattactcatgctcagtgtggagctcaatacacatttgcacatagacacatgggtacacacactcacatacacgcatacaagtacagcatttaaatcagcaacggcagagtgggcaaacctggggtacggaggggtgggagggcagaactttttgcaggttatagccacacaaaaagacacggaggacaggaagaaagaaggaactgt

SEQ ID NO: 454 - DNA, 515 bp, Roccus saxatilis
taaagctctctggtggaactataacagcatacccttcctccaatacacacacatacacacacacacacacacacacacacacacacacacacacacacacacacacacacacacacacacacacacacatctcaatacacaacacataagattcaattcaataaagatgaatggaacttcgtatgtgaaccttgtagtattaatacctcagagtgaacagttcctatgaaaactgcagacactggagaaagatgttgctgctgatttgttttattttatttaaacaccacaaaccaaattccattctccaccccaataattgtatttgggtggagcaataaatctcagaatctgaaaaccttgaaacagaaaaaccaaagcaatctgaatggatggatttcactttgtgtgtgtttttttttttgtaactggatgaacggatggtagagttttaaaaatgatagctataccttctttggagaggcgtaagatgtgctctcccagctcctggaagc

SEQ ID NO: 455 - DNA, 486 bp, Roccus saxatilis
agtattgcccacccaggctgatgaaaccctgtggtgtgtgggcagattgttcacaccgcatctttcagttgtgcttcctgaacaaaaccaccctctgcactcccactcggattgctaagaggtcaagtacatgcacacacacacacacacacacacacacacacacacacacacactgtggagaaagaagtcacggttattctcaagttctcttttctcttttcactgagattggggttgcacacaaacacattgcaacagtctctcaggtcacatcaattcatatgcgcaccttttctagggtcagggttacacacacacataggcacaaacacacacacacacacacaaagactttcccaagtgagattgcagctctaccaataaggcctcaggtctgcagcaacagcaaactcccccatagagaccaaagccaatttatttcagtcaggctgctggtgacagaaacggaagctttaacagagg

SEQ ID NO: 456 - DNA, 426 bp, Roccus saxatilis
tgtttagctatcttttgtttttatgttattgtgtagtcgatgctgtctgccacttgagggaaaacattttagataacacatattaatcatttatgagttgataaagtcagaaatactgctgaaaactttcttgatgaataaaagcagcagggtgccttttccctacctgtatcactcacaccaacacacacacacacacacacacacacacacacacacacacacacacacacacacacacacacacacacacacacacacacacacacacacacacacacacacacacacacacacacacacacacacacacacacacacacacacacacacacacctacctaggggcactatagttatattagggttttatgctccaaactgtgatgtgttgaagtgcaacgagtgaccttctgacaaggacgg

SEQ ID NO: 457 - DNA, 271 bp, Roccus saxatilis
ggggcagcggcaggccacagcgcgggcccctttgtgctgttcaccagctagagacgcacggacaggagacacagtctaaggcgagagacaggcctggtgctaatgtctgctctaactcaatagagaggctgcctcgctgctttggctggctgctctcactctctctgattgaccactccattaaaactgcactgacatgaccgctgtgtgtgtgtgtgtgtgtgtgtgtgtgtgtgggagggagggttatcctttagagatccccgggtac

SEQ ID NO: 458 - DNA, 514 bp, Roccus saxatilis
  misc_feature 496, 499, 514: n = A,T,C or G
attcccaccagcttccctcccagcacggcgcagatgaagaggatgacttatgccaaacaggttccctccaggtaaacactgacttcctgtgatggaccaaacgactccgaacagcagagcgaacagacacactgcgcgcgcgcacacacacacacacacacacacacacacacacacacacacacacacacacaggttaatacacacagtctctcagtctctacagtgttcccctgttggagctgaccaacggtggccattttatttgacattttgcaaattatgtttttatgttagtacttcaactgatggactgtgtgtgtattaatgtattaacacacacacagacacacacacacacacacacacacacacacacagacacactcaggtacctttagtaatgaccaggctgaagagtccatgaggtcgaggacatctgtccttcaggctgatacaagacgaacagcaggaggacgagtcagatgctgccatnttnattcaaacacacacn

SEQ ID NO: 459 - DNA, 495 bp, Roccus saxatilis
  misc_feature 397, 436: n = A,T,C or G
cagatattgccccctgtgtgttgtgattgtaaaaaggcaactgcttgctaatgttcactatatccacagtgtttccagtttgttttgccgccctccagtggccaaaaaagttattaatgttgttgtaactaaagagcttgaacctagtattatttgtgtaaagacaacctgttacaacatatatagcacaatgtgtatagcatgtgcagtaatagccactgtgactgactgactgtgtgtgtgtgtgtgtgtgtgtgttatgttttcggagcagtactgcatctggactgacgggctgtgtgcgctgctgggcagagagatgggcagtgacctgacacgcagtgacctagatactctcatcagcatggagatgaagctccgcctcctagaccttganaacatcacaatcccagaagccccgccccccgtgccgaangagcctagctcgtataacttcacttacaactacagctgagtgtgtgtgtgtgtgtgtgt

SEQ ID NO: 460 - DNA, 468 bp, Roccus saxatilis
  misc_feature 304, 323: n = A,T,C or G
aattcgagctccgtacccggggatctggaatgatggaaatggctggaaatggctgcacaatcataaggatgcggtggtggtgtcacagtacaatcaggtaacatctcggtgatatggacacttgaagtggttagtgcttgagacaggtaaatagtctctcagtgctaacagcgcttccagctctttccctgcctgtgtgtatatactcaagtttccctgggcgtatgcatgctcctgtactgtaaacacctatgtgtgtgtgtgtgtgtgtgtgtgtgtgtgtgcctcccccctcctcctgctnctgtgtgtcggcatgcggnaaccagcagcactgtaatcaaactatcactgcgcaggggaatagcgctctcttcaagcggctcctgtttcccccttacaccaaaaacaaataattactccaccatttttgggtaaaccataaaccgaacgtgtcgcctgcgctgc

SEQ ID NO: 461 - DNA, 478 bp, Roccus saxatilis
  misc_feature 33, 365, 423: n = A,T,C or G
ggttctcatttatgactcacacattgatagtcngtgctgaaatagtgtaaatacaaacacacagagacaatgtggaccatgagtcagtgactatcataagtgctcaacatttaaaccatctagctctgagaaaacctttgcttctttgtttttgcctttatcgttctggatgtcagccaaaacagacaaacacagtcttggatacacacacacagacacacagacagacacacagacacacagacacacagacagacacacagacacacacacagacacacagacacacagacacacagacacacacacagacacacacacacacacacacacacacacacacctgaatggcccaggaaacagtngggctgcagggcaattctaaagacatgactaaaacctgttaagtttccactacacatnctgttgtcctaaacatctcctgcacctctgcatgtatgtggattgtgtgctctgt

SEQ ID NO: 462 - DNA, 436 bp, Roccus saxatilis
  misc_feature 7: n = A,T,C or G
catgttngtagctttttttttttttttttttttttagctaaaccaacatcgtgttagcaaagagccacagaagaacaaaccaccaggcttgtttggctaacagtgacctttccacatcctcattaactgcacgtaacaacacacacacacacacacacacacacacacactaggctacatggccaaatggaaggactcagcttcatttagtcatggtcaagcaagccacataagtttgggcaacgtgtgataaagcgaaagaacgtcagcttggcccttcgtgtccacttgtcaacacaaacaagtctgggaggcaacttttcaaacgttgaaggagctagctaaaaagctacttagcaagcatgctaaccttcgctagctgagcatttataaaagtagcacactgaaatggctgcgttcaaggatccccgggtac

SEQ ID NO: 463 - DNA, 543 bp, Roccus saxatilis
  misc_feature 482, 487, 521: n = A,T,C or G
tgtagatgtaacgttgtccttacagcgtggtttagactgatttctacaaagaatttgcagcttcaaccaccgccatcaacccatctccaatttgtgtgttgtatcgtatctgtcatgcagcaatacttccacgccggtggtgtgggcctgaagaaaaccttcttggaaaagagtccagacttgcagtctctgcgctacgccttgtctctgtacacccaggccacagacaagctcatcaggaagtttgtcctctcacagagcgctcagggtgcgacttcaaacagcaacaacacacacacacacacacacacacacacacacacacacacacacacacacacactgtcacacagcaggttcaaatgatttcacacaaaatgtttcacttactctcaaagagctccactgcttattcttactaaaagtaaggcttatggaattaaatgggattatgagattaaatagaataacttggttaccgngttgnaatgtttaattcattgctacagtgaattacaatnaccataccaagcagattcaaaa

SEQ ID NO: 464 - DNA, 535 bp, Roccus saxatilis
  misc_feature 447, 515, 520: n = A,T,C or G
ctatctgtgtcctgccataactttatcaacacttaaatcagagctttaatcttatctgacccccccccccccatcgtctgtgtctgctaggtcagctgacttcctgctcagagactggctcacttcctggctgcgtcattttcctctcttaccgccactgtgatgacgtgttgtgttcaaatctctgatacctgatctgacataatcgcacggtctcttattgggctgctgatggctgcttattggcctctgggctgtgttttacaggaagatattgatggtttgatattagcttcttactggcaaatacacacacacacacacacacacacacacacacacagacacaaatctgcctcttagttattgatgagctaatatctgtgattatttgtagtgcacaaagaaagacaactgtccaaattatcatcatgtagagtacagtantgtgtgtgtgtgtgcgtgtgtgtgtgtgtgtgtgtgtgtgtgttttgaaaaccgttatctgttacacnccccnatccgataaggaaaa

SEQ ID NO: 465 - DNA, 516 bp, Roccus saxatilis
  misc_feature 507: n = A,T,C or G
gtaggaatgagcagcccgtgacatgggttaatttactggacctaggaaggttcattgtttcctgtcattcctgaactcatcgcactgacctttaccgccctgtcctgcgctgtgcgtgtgtacacatggacatgtgcatgcacacacacacacacgcacgcacacacacacacacacacacacacaccaactacaaatgtatactgctcaaatgactacactgctcactgcctaaccacagaaagagaaaaagtgagagcgacacattgacaaacagatggacagataaagacaaagagcaaccaccctttcaactgtccaaaagtatccttgaattccagaaagtttcacattattttctacaataataaaaaaaacacaccagaataccccaaggggaaaagaaaaccagtatacagaaggttagctgtctatctgctagtaacctattaaggacaattatagaggcctatgattgataaatagatgacctcaaggccaaatttnaactatatt

SEQ ID NO: 466 - DNA, 553 bp, Roccus saxatilis
aacaatgcagctggctggtgcttcatttcatccgagatactgtggtgttaatgagggccccagggaccggcacacacacacacacacacacacacacacacacacacacacacacacacacacacacacacacatgtttacacagatactgtacatgtaggtgtttgtacaggtgtttgcagtgagtagacaccagctcatgctgtactatcatttacattatcatttactctgatacaataaagagcaaaaaaacccaaaatgtgcaacaacctacagacgacccacttattcaaatatgtaccaaacaaacaaacaaaagggtacagatttaatccgacatgaagcacaaagaaacagcagataaaactgcaaaaaaactgaagcatgacacaggatgaaaccactaacagtttatacatttactttaagagctcagtaaggctgagtcagcaaaaaaacatactaaatccataatttaatgatttaatttttgtccttaaagatgagaactaaacacataaaaagttgtaaggtaatgtaatacttattt

SEQ ID NO: 467 - DNA, 432 bp, Roccus saxatilis
agattagagagatactggaggatacaggagttagtttatatatgtgtgtgtgtgtgtgtgtgtgtgtgtgtgtgtgtgtgtgtgtgtgtgttcactgcaaagcatcatttcttgtctaaaaagaaaaataatcttgtcaagcattattgcattagacatttttgttttaagaaaatattttagttttgtcttaataaaatattccagctaatattgagctagatttaacaataagttaagacaatggtttgcataatattccagcagaggaacacaagtattttccttattttaagaataagactagagaaagtagtctagtgaccaaaatacttaagtctatcttaaataactgagttttcattgtttgtaagcacaacttttttacttttttctagttttaagacccattacagtgtgtcagtggttaga

SEQ ID NO: 468 - DNA, 549 bp, Roccus saxatilis
cccgggtatattctatcaaccattaattactcaaaataatgtttagttcaataaatatatgtattgataggtaatatcattatagttcaatgcatttcatgtctaagttaggccatttaatcatgcaaattgttttgtttttgagaattaaagaaaaacaatgtttacaaaatgcaacatattaatcataagaagtgtttttaaaaatgagacacgctgcgaataccgacagtaaaagctgcattgcaataaataaataaaaaaaacatcgccatatatcttaaaatctgactttgttactaatgaattgccctaaaaagacacgcagataaccggcacggattgtctcccactcatcccaaataaatatataaaggatgggtggacaaaaaccacgcctttcaagagatgatgacgagcacctgtgacccccgcaacatttttcacacacacgcacacacacacacacacacacacacacacatacacacacacacacacacacatacactcgccacattgttaacgctggagacaagagtacagcaa

SEQ ID NO: 469 - DNA, 452 bp, Roccus saxatilis
  misc_feature 347, 352, 362: n = A,T,C or G
ttaaaactgatgagaaaactaagaaacatgcaggggtgcgaccctccccttggcattgaccgccctctcccttcccatggacactcttgtgtgaatttggagcaaagccccctggataaatggaaggtttaatgtaatccctataaaatcctgttcatgctgctactctttctctctttctgcctctccctctcctctttcattcattcctgctctcccagggagcacgttaaatggttaacggcggggccaagcgcgaggtgtaaaccgcaaagagatggggctaagtgttgggagcgtgggaccacaagctccacgtgtgtgtgtgtgtgtgtgtgtgtgtgtgngcgangagagattancccccttttaaagagcccgcttttaatctggtctacccctcgtctctcccgctttcccagtctatctttctcggtgacagtgaaactttt

SEQ ID NO: 470 - DNA, 639 bp, Roccus saxatilis
  misc_feature 529, 591, 600: n = A,T,C or G
tcctcggagcggatgccaccctccgtgttttgcaggtcgccgctctctgatggaaagctctgaataacaaagacatgtttgagagcagcagcggcatcagcagcagcagcagcagcagcagcagtctgggctgagcgctgacgtcaaggagccatgactgtgccaagcagcatccagactccagtccaccacaaacacacacacacacacacacacacacacacacacacacacacacacacacacacacacaaacacattgacctgctgctgccactgtggcctgtttggaagcaccccatgtcaaaagttagaaacacaccaccctgcgtgctgtgattgactcttcaaagttggcctgtgattagggtcagagtggtgttttcgctctcagaatactcttattgcagaagtcaccgcacaagtgatacactctggtggtgtgtttggagtccccttgcttttttctggtctgtgtgtctatccccagctgtctaagttaggggggagggataggctggaacaatangcgccatttgtcctgctaaaaggggacaggaagcatttgattttcagcctgttccaagcttntaagccatnccttgaattggctaaatgggaacattttccttctaacgg

SEQ ID NO: 471 - DNA, 624 bp, Roccus saxatilis; identical to SEQ ID NO: 429
  misc_feature 514, 524, 539, 549: n = A,T,C or G

SEQ ID NO: 472 - DNA, 630 bp, Roccus saxatilis; identical to SEQ ID NO: 418
  misc_feature 420, 510, 534, 630: n = A,T,C or G

SEQ ID NO: 473 - DNA, 805 bp, Oreochromis niloticus; identical to SEQ ID NO: 309
  misc_feature 3, 7, 12, 14, 15, 18, 43, 99, 133, 556, 670, 677, 718, 727,740, 753, 755, 771, 794, 805: n = A,T,C or G

SEQ ID NO: 474 - DNA, 21 bp, Oreochromis niloticus
tagtggcgagggtgtatttga

SEQ ID NO: 475 - DNA, 17 bp, Oreochromis niloticus
cgaccgcaactggactg

SEQ ID NO: 476 - DNA, 390 bp, Oreochromis niloticus
tgccccacagctctctgacccgcctcgttcccttcctgcacacacacaatgcattaaataaacacacacacacacacacacacacacacacagcactggagacgcacatggagtcccagtgaggcaggatctcagtgttccaggtgaccatggcgttggagatgctgtcctcctgccggtgtctctccttcatctgacgcttcttcctctgggcttctttcagctctgaaggagacgcaacagcacgagccaatcaaatccaagaacagcaccagccagtgacctcaatacgtgtgtgtgtgtgtgtgtgtgtgtgtacctctcctcttggctcctgccaccatctcctcgtactccagcttgtgtctcttgagtttcctctgtagattt

SEQ ID NO: 477 - DNA, 20 bp, Oreochromis niloticus
ccttcctgcacacacacaat

SEQ ID NO: 478 - DNA, 20 bp, Oreochromis niloticus
gctggtgctgttcttggatt

SEQ ID NO: 479 - DNA, 338 bp, Oreochromis niloticus
agtgtccggatggctaagagtctctgtcagcaactactgcaagacacatgtagcgctctagataaggtgtgtgcacatgtgcgtgaatttaactctgtccctgttttgcagcacatcacctgattcctttttctcctgcactgtgtgtgtgtgtgtgtgtgtgtgtgtgtgtgtgtgtgtgtgtgtgtgtgtgtgtgtgtgtgtgtgtgtgtgtgtgtgtgtgtgtgtgtgtgtgtaggtctcacacctcctccatcaatgtgagcagccaattagggagcagctaaatgtggtcaagtcactgtggcaggaagagaggtgcatcctgggaagctgcc

SEQ ID NO: 480 - DNA, 20 bp, Oreochromis niloticus
gttttgcagcacatcacctg

SEQ ID NO: 481 - DNA, 20 bp, Oreochromis niloticus
gccacagtgacttgaccaca

SEQ ID NO: 482 - DNA, 365 bp, Oreochromis niloticus
  misc_feature 3, 9, 12, 14, 22, 42: n = A,T,C or G
ttntttctnccnanaagatccnttggaaccccgccccttttngaggtcgacccgtatcgataagcttgatatcgaattcctgcagcccccctcaaaagtgcaactacagtaacaatgatttgatgtcattaagaggaatgtgctagaagatttacatagcatggatcagattactggatcacagatcacagaattatggatttatagctcctgtggtgacttaactcaatcggatgtcctcataactatagaaaaacactattctctctgtgtgtgtgtgtgtgtgtgtgtgtgtgtgtgtgtgtgtgtgtgtgtgagactttgtaatggtggctttcaaagacaagtggacatgaaccaatggt

SEQ ID NO: 483 - DNA, 21 bp, Oreochromis niloticus
ccctcaaaagtgcaactacag

SEQ ID NO: 484 - DNA, 21 bp, Oreochromis niloticus
tgaaagccaccattacaaagt

SEQ ID NO: 485 - DNA, 239 bp, Oreochromis niloticus
  misc_feature 80: n = A,T,C or G
ccataatacacacacaaacaactaagcacacacacacacacacacctttccttgcttacagtgggtcttcctgtagttgnggcgcctcgccgaacaaacacagagcaacaatacagtactggctaatctgtgatcctaaggaacatcaagttctggaaacacagccaaacgcctgcgcgcacacgcacacacagacacacacacacacacacgggtgaacaaacagctatcccagacat

SEQ ID NO: 486 - DNA, 21 bp, Oreochromis niloticus
tgcttacagtgggtcttcctg

SEQ ID NO: 487 - DNA, 21 bp, Oreochromis niloticus
tgggatagctgtttgttcacc

SEQ ID NO: 488 - DNA, 613 bp, Oreochromis niloticus
  misc_feature 4, 8, 17, 595, 613: n = A,T,C or G
ttgntttnatgaccgtnagctccaccgcggtggcggccgctctagaactagtggatcccccccaagagcagatgctgctgctatgaagatagatcacagtgggcgcaccgtttccttcctgcgtgctgtgatgctggggtatccagacaccgcgcgcgcgtgtgtgtgtgtgtgtgtgtgcgtgtgtgtgtgtgtgtgtgtgtgagaaagaggaagtaaaaagaaagcccaaaatgttgagtgtcttcttttgcagctatatacatgtgcattgtagagtatttggatttgtttttggtttatttcttttttctttctcatgcacagctatatgacaatttactaataaattatagctgcatgtgaatgtcctacaaatgtgtctgcctggctgtgccctattgatcagccagattgcacctggggctccggatggatgaccctctattaggctgtcggaatcccagtaaagaacatctcagcagctggggggctgcaggaattcgatatcaagcttatcgatacccgtcgacctcgagggggggccccggtacccagctttttggtccctttagtggaagggttaaattgcccnctttggcgtaatcatggn

SEQ ID NO: 489 - DNA, 21 bp, Oreochromis niloticus
agatgctgctgctatgaagat

SEQ ID NO: 490 - DNA, 20 bp, Oreochromis niloticus
gctgcaaaagaagacactca

SEQ ID NO: 491 - DNA, 413 bp, Oreochromis niloticus; identical to SEQ ID NO: 310

SEQ ID NO: 492 - DNA, 20 bp, Oreochromis niloticus
tgcagaaggttgcagtgttt

SEQ ID NO: 493 - DNA, 20 bp, Oreochromis niloticus
gtcggggctctttgtaatca

SEQ ID NO: 494 - DNA, 835 bp, Oreochromis niloticus
  misc_feature 5, 6, 7, 24, 32, 39, 550, 627, 662, 676, 677, 694, 696,701, 713, 737, 762, 785, 811, 812, 817, 820, 827: n = A,T,C or G
ttgtnnnccctttgatgcctttgnacgcggcncggccgntctagaactagtggatccccccccaatcaaattaaccagagcaacatgctgccactcagtttttcattgacatgctgccgtgtcatcgcctcctggagggcaccatctctaaggaaacagcttttttcacctagaaagcacacacacacacacacacacacacacacacacacacacactcattatttctaatgagattgtaaaagttgaaggagagaagttatattaactcttctagtagacaaagacctctgtatctcacgtcatctccagctagaagccaagacattaccttcttcaaatagaagcttctctattaaatttactctgttgtgcatgccctctgtaaacacatctgtggaataatatttcacatttgtcccctttaacatggaagtctaaatggactgacgtagctctggagcaggtgccaagtgggggctgcaggaattcgatatcaagcttatcgataccgtcgacctcgagggggggcccggtacccagcttttgntccctttagtgagggttaattgcgcgcttggcgtaatcatggtcatagctggttcctggggtgaaaatgttatccgntcacaatttcacacaacataccgagcccggaagcntaaaaggggtaaanncttgggggtgccctaangnggggngctaactcacantaattgggggttgcgctcacttgncccgttttccaatcgggaaaacctnttggggccaacttggatttaaangaattggccaacccccggggagaagnntttcnganttgggcnctcttcct

SEQ ID NO: 495 - DNA, 19 bp, Oreochromis niloticus
ggcaccatctctaaggaaa

SEQ ID NO: 496 - DNA, 21 bp, Oreochromis niloticus
taaaggggacaaatgtgaaat

SEQ ID NO: 497 - DNA, 317 bp, Oreochromis niloticus; identical to SEQ ID NO: 371

SEQ ID NO: 498 - DNA, 20 bp, Oreochromis niloticus
aaatgagcagcgggtatcag

SEQ ID NO: 499 - DNA, 20 bp, Oreochromis niloticus
gttccgccatttgtctcatc

SEQ ID NO: 500 - DNA, 605 bp, Oreochromis niloticus; identical to SEQ ID NO: 311
  misc_feature 2, 3, 4, 5, 15, 30, 394, 420, 452, 467, 470, 476, 483, 489,502, 505, 508, 515, 517, 519, 525, 534, 535, 541, 543, 548, 551, 552, 553, 554, 560, 570, 573, 575, 577, 585, 592, 593,594, 595, 599, 603, 604: n = A,T,C or G

SEQ ID NO: 501 - DNA, 18 bp, Oreochromis niloticus
gtggagcccagtggagtg

SEQ ID NO: 502 - DNA, 21 bp, Oreochromis niloticus
atttggttccggtagatggtg

SEQ ID NO: 503 - DNA, 570 bp, Oreochromis niloticus
  misc_feature 9, 19, 40, 46, 111, 113, 511, 570: n = A,T,C or G
tggactccngagcccttgnaacccccctcgaggtcgacgntatcgntaagcttgatatcgaattcctgcagccccctattcattccttaatcatctgttcatccatatatngngggtatccatacatcatcgatccatcctctcttgttatcatctgctcttcccctcctgccccaactcatctctctctctgccctctctacatccattcattcatccaaatctcaatccctccatcccaatatcgatccatgcacacaaacattcatctatccactatgaatatatctatccaaccatccttccttcctgctctccctccttcctcccttggctccttatcccagtcgaaaggcttctacagcaagacttaacacgctccactacctccccgtccctgcatgtgaacacacgcacgcacgcacacacacacacacacacacacacacacaaaggcagtccctacaggatgcaagactcaaagacacacaggacatcgttttcacagctncctgagcaactcaaatggggggggaaccactagttctaagagcggccgccaccgcgggn

SEQ ID NO: 504 - DNA, 19 bp, Oreochromis niloticus
ctgcatcctgtagggactg

SEQ ID NO: 505 - DNA, 21 bp, Oreochromis niloticus
caagacttaacacgctccact

SEQ ID NO: 506 - DNA, 345 bp, Oreochromis niloticus; identical to SEQ ID NO: 312
  misc_feature 38, 231: n = A,T,C or G

SEQ ID NO: 507 - DNA, 17 bp, Oreochromis niloticus
gatcgggctggggtttc

SEQ ID NO: 508 - DNA, 21 bp, Oreochromis niloticus
agtcccgcagttcaatgtgtc

SEQ ID NO: 509 - DNA, 335 bp, Oreochromis niloticus
  misc_feature 127, 287, 322: n = A,T,C or G
gggatcaaacaggcagatttgccacgcctgacacccctgctgctgcaagtgtgtgttttgtgtatgtgtgtgtgtgtgtgtgtgaactcagctcggactcagtaatgacaggatttgttaaacagtnaattaatgaataatgaaatatccagcacgcgcctgccttgcctggagcacagcgccccgagcaggaattactcccgaccggcactcggctgtctgcatgctggataacctgagcgtgcgtgtgtgtgtgtgtgtgtgtgtgtgtgtgtgtgttggataancatttttacagcccattgcgtgacagaacgccgangggctttgctgat

SEQ ID NO: 510 - DNA, 20 bp, Oreochromis niloticus
gtgaactcagctcggactca

SEQ ID NO: 511 - DNA, 20 bp, Oreochromis niloticus
acgcaatgggctgtaaaaat

SEQ ID NO: 512 - DNA, 416 bp, Oreochromis niloticus
tgccctgtatgatttataactgtgggtctgtcagtgtttactgccaaaaattggcttgtttcagcaataacatgcatacacacacacacacacacacacacacacacacaaacacaccctcactcacatgaaaacatcagaccaaccacaatggacctttctcccacatttttacctcactctcagtggaatttcagcttcacggctgctttcaaatccaaaaactttgtacctcccaggtttcctcgtcattgcttcggagccagcagaagacatggagcggcaagctggaaaagaatacacgcagaaacctgaacacacccatgttttatatttgaagtttggaaagtttttttatgcaccttaaaaatctggcaatctcacaaacctcaaaagactgaagttaaattctctcc

SEQ ID NO: 513 - DNA, 20 bp, Oreochromis niloticus
ctgccaaaaattggcttgtt

SEQ ID NO: 514 - DNA, 20 bp, Oreochromis niloticus
gaagcaatgacgaggaaacc

SEQ ID NO: 515 - DNA, 437 bp, Oreochromis niloticus
ccgagctgggggacatggggcagggggtggggggcttggacacacactgtgagctgtagttgtcctgtgatacaacacacacacacacacacacacacacacacacacacacacacacacacatatatcagaaggagctgtttcttcttcaggttttcattctcacagccagcaccagtctaggttggagcgcctgcagtcagctgacagtagaaacaacatgtctgccagcagctggttaactgcagagaaccagccgctgctctctggttaattgcagcgaacactgaagtgtgtgtatgtgtgtgtctttgttagagacgacaggaaaggagtgaagacacacactcgtgtggctggttctacttggttttcggtgtgtgctgctctggatgtgaagcctttgctaaactaaccacacagcctggtacggtggg

SEQ ID NO: 516 - DNA, 18 bp, Oreochromis niloticus
ggggcttggacacacact

SEQ ID NO: 517 - DNA, 20 bp, Oreochromis niloticus
ctgctggcagacatgttgtt

SEQ ID NO: 518 - DNA, 193 bp, Oreochromis niloticus
ccgttttcccctctactgcctccacacccagcctgcatgtttgttatgctgccttcaggcttggtttggaaatgtgggcgtttttgtgtgtgtgtgtgtgtgtgtgtgtgtgtgcctgtgtgtgggagaattgctgcacattaacaacccgacaaaatggaaagtagtgccgggactttttgcttgataagca

SEQ ID NO: 519 - DNA, 19 bp, Oreochromis niloticus
ccgttttcccctctactgc

SEQ ID NO: 520 - DNA, 20 bp, Oreochromis niloticus
aagtcccggcactactttcc

SEQ ID NO: 521 - DNA, 607 bp, Oreochromis niloticus
  misc_feature 6, 18, 19, 26, 488, 571, 580, 594: n = A,T,C or G
ttgaanccttggaacccnnggtggcngccgctctagaactagtggatcccccctgattgtgtgattcaaaccagctgaatgtggcagccatgccccagagcatcatgggaactgaagtctctagattcagtctgccgagtagttcttatagattattattgatcccagcagcaggagaggtgtgtgtgtgtgtgtgtgtgtgtcagactcgaacatgatctcaagtcacgtgcctcttaatcactataggaaccagctgatgtgttgcataagacaggtggtggggttatcgagatgacatcatcatactgcttagtttacagaaaaatgtgtgacaaccatccgttctgctttgcgtatgccaatgtggacccagacccctgccccactgtttccaaatatcttgagctcatctacagctgtgaacaaaaaggtaacttctccatcggtttttctaaacattttcatgtagtattacatatttatcntgagttagtgcaattccggctttcatgcttttgtgctttgaatgctcagtgtgcctgcatggcttgggtcttgaacatgggcnacatcttanaatgccatgctctntgctttccttctc

SEQ ID NO: 522 - DNA, 20 bp, Oreochromis niloticus
gattcagtctgccgagtagt

SEQ ID NO: 523 - DNA, 18 bp, Oreochromis niloticus
gaggcacgtgacttgaga

SEQ ID NO: 524 - DNA, 616 bp, Oreochromis niloticus
  misc_feature 7, 10, 13, 19, 26, 27, 30, 31, 37, 47, 73, 74, 75, 78, 492,607, 609: n = A,T,C or G
aggaggngtnacntatttntatatcnnggnngtgaanaggttctccntttggttaagggcccaccgtatcgannngcnggatatcgaattcctgcagcccactgtgggctggttgcgtgtgctgcagagttcggagcagaaactaggacaccctgagatcaacaggaaaccaaaaccctccgtctactgacatcatgacccagaaacacccacccccacacacatacacacacagagtgaaggagaagttggctcaccttgggaaggctccctcctcggtctccctgctctctctctctcacacacacacacacacacacaaactccatccataactcttcatcactttgctgaccatcatcatcctaaggaggttcgtctcacctcagccaaggagggggggatccactagttctagagcggccgccaccgcggtggagctccaattcgccctatagtgagtcgtattacgcgcgctcactggccgtcgtnttacaacgtcgggactgggaaaaccctggcgttacccaacttaatcgccttgcagcacatccccctttcgccagctggccgtaatagcgaagaggccccgcaccgatcgcccttncnaacagtc

SEQ ID NO: 525 - DNA, 16 bp, Oreochromis niloticus
ctggttgcgtgtgctg

SEQ ID NO: 526 - DNA, 21 bp, Oreochromis niloticus
cctccttaggatgatgatggt

SEQ ID NO: 527 - DNA, 515 bp, Oreochromis niloticus
tctttgataattaaggtgtgattctcagagaaatagaatcttgcataaccagacttttctctacaacactttaaaagctttttcggcagaatttgtgaacagaaatgcaaggatgcccctgttagatcacatattatttttcgctctttaaaaccattcagcaaaagaaccaaacccttacacgtttctgcacgatccaaatcttcatcaaaacttgccatttggagtgtacaggttactagcttaagacagtcttatgccaacagtctacaacttatcagttagacaaggttatttatatacccaacagttggcaagtcaattatctggcaacacctgcaacacgaagatgaaacagtgtttcaaacaaatctgcaaaaatgtcagtgaaaattacagattactaaaggggtgcgcgcacgtcacgcacatgcatgcacacacacacacacacacacacacacacaaaatcaaaggcagtgaagatccaaaatggaaagcatcacagctatagg

SEQ ID NO: 528 - DNA, 20 bp, Oreochromis niloticus
ttatctggcaacacctgcaa

SEQ ID NO: 529 - DNA, 20 bp, Oreochromis niloticus
tgtgatgctttccattttgg

SEQ ID NO: 530 - DNA, 612 bp, Oreochromis niloticus
  misc_feature 3, 4, 5, 7, 15, 20, 25, 26, 27, 46, 433, 470, 476, 489,496, 498, 519, 531, 545, 550, 553, 558, 565, 567, 574, 580, 591, 597, 600, 602, 609: n = A,T,C or G
ttnnntntttgatangatanacctnnntaaacgccccggcgttttntctagaactagtggatcccccccaaaggtcagaaagagaaacacctttctttgccggctcttcacgcttcactgatgacatttcagtgtgtgtgtgtgtgtgtgtgtgtgtgtgtgtgtgtgtgtgtgtgagagagagagagagagagtcagagagagtgtgtgtgtttgtgtgcatacctgtattaatcatgctgtgagtgaactgctctgtttgttcatactgttaaaataactcattaaattacttgcatccttactttactttctcaaccatctattctcttctgctcatccttatcagggctgcaggggggctggagccaatcccagctaccatagagcaacaggcagaatgcaccctggacaggtcgccagtctgtcacanagagacagacagtcatttttcaccagtttaaaatccnaattancctaaccccactnaccccgntnaagggcttttgaccatgggangaaaccccagtnccccaagggtcccncaccnacntgtgnaaaaacntntaaactnttcacnccaaaagggcnccccgnaantnccccccncct

SEQ ID NO: 531 - DNA, 21 bp, Oreochromis niloticus
acgcttcactgatgacatttc

SEQ ID NO: 532 - DNA, 20 bp, Oreochromis niloticus
ccctgataaggatgagcaga

SEQ ID NO: 533 - DNA, 618 bp, Oreochromis niloticus; identical to SEQ ID NO: 313
  misc_feature 13, 24, 29, 91, 118, 398, 517, 539, 541, 542, 547, 552,566, 567, 569, 573, 576, 578, 579, 580, 591, 592, 597, 601: n = A,T,C or G

SEQ ID NO: 534 - DNA, 21 bp, Oreochromis niloticus
gaacagcctagattcaaacag

SEQ ID NO: 535 - DNA, 17 bp, Oreochromis niloticus
cgtgctgatgatggtgt

SEQ ID NO: 536 - DNA, 604 bp, Oreochromis niloticus
  misc_feature 1, 3, 6, 14, 17, 22, 25, 30, 42, 530, 599: n = A,T,C or G
ntnttntttgatangtnatgcnctntgagntccccgcggtgntcggccgctctagaactagtggatccccccccctgaagctggctgtgcacaacagctgcaggctgcatgccccccccgtccacacacacacacacacacacacacacaccctctcagtagctgaaagtgccaggaatgtgttgactgcttacaaacagaacccaaacccaggtttcactgcgatcctgcagcacagacactgcagtgctccttatgtgactgcatgcagggatagttacgctgtagtagatttagtgtgtaaatgtttatcaactgtagtcagaactacatctgatgggtgcccacaatcaagttcggactatagttacattaacatttggttattagcatgaaaaagaagagacggtgatttttgtgtgtttctgcaacatctgatgctcgtcatatttgctggtagttaataattaatgaaatattgtaaggtgaatgtggtggtgctctatataactagcgttaagaaaaccccnccgttaagcttattgcgcccactaacgggggctgcaggaattcgatatcaaagcttatcgatcccgttnacctt

SEQ ID NO: 537 - DNA, 16 bp, Oreochromis niloticus
ctggctgtgcacaaca

SEQ ID NO: 538 - DNA, 21 bp, Oreochromis niloticus
tttgtaagcagtcaacacatt

SEQ ID NO: 539 - DNA, 606 bp, Oreochromis niloticus
  misc_feature 2, 3, 4, 7, 8, 9, 10, 14, 15, 19, 21, 29, 34, 41, 457, 461,464, 467, 526, 533, 563, 573, 595, 597, 599: n = A,T,C or G
tnnnttnnnnctanngaancnctttgganacccngcccccnctcgaggtcgacggtatcgataagcttgatatcgaattcctgcagcccacagagcttccatatgaaacaagtaggagctgtttacatgagaaacagtgtcgggttgtgctccttagccgcctacccacacacacacacacacacacacacacacacatagccacagcagaatagttgttggctggggcattgctgcactcacaaagagcgtctgcagacttttattcttttaatagaccaaatgtgtagcacaatgggggggatccactagttctagagcggccgccaccgcggtggagctccaattcgccctatagtgagtcgtattacgcgcgctcactggccgtcgttttacaacgtcgtgactgggaaaaccctggcgttacccaacttaatcgccttgcagaaaatccccntttngcnagntgggcgtaatagcgaaaaggcccgaaccgatcgcccttccaacagttgcgcaacctgantggcaantggaaattgtaaagcgtaaattttttggtnaaaattccgngttaaatttttttggtaaaaanancncattttt

SEQ ID NO: 540 - DNA, 18 bp, Oreochromis niloticus
tcgggttgtgctccttag

SEQ ID NO: 541 - DNA, 21 bp, Oreochromis niloticus
agccaacaactattctgctgt

SEQ ID NO: 542 - DNA, 291 bp, Oreochromis niloticus
  misc_feature 5, 10, 65, 68, 270: n = A,T,C or G
cacgnactcngtcaactctgagcctgtcgcttcccatccatccccacatgcaacgccccctttgnttntccaagcacagtccagcccaactcactcctcccttagtgctgctgctgtgtgtgtgtgtgtgtgtgtgtgtgagtctgcctgtcacaccgagttagcttttcagtaactcggtgaacccggaggtgaaacaaactgctgccgggatgatcaggcacgctttaccattggaccacctctccgcatgtaatcaggtctcacatncttttttgtgaatgacaaata

SEQ ID NO: 543 - DNA, 20 bp, Oreochromis niloticus
aactctgagcctgtcgcttc

SEQ ID NO: 544 - DNA, 20 bp, Oreochromis niloticus
ggcagcagtttgtttcacct

SEQ ID NO: 545 - DNA, 638 bp, Oreochromis niloticus
  misc_feature 3, 4, 5, 6, 7, 8, 10, 11, 13, 17, 19, 28, 30, 31, 53, 553,576, 617, 621, 626: n = A,T,C or G
agnnnnnntnnantttntnttttgacangnnagcttatggaacactcggtggnttccgctctagaactagtggatcccccatcgagaaaacacggctcgggcaaagccagagcagacagaagatttaataagaagtggtagctttaggcgtgtataaattgcagcgggaagatctgacaacatgtatcataatggaaatgtgaaatgtggtggctttctataaacagacatgcagatggctaagaacctcttcaccagctcttttttttctctttttttttctataacgaggaaaaaggaggcggtgggacggggggttgataatgcacactcactcacagcatcaataataaaaccactgagtttaacattgctctcccacttaattaaccacagtatggactacgcacttagtgtatatctgcaaatcaggcactattacacacacacacacacacacacacacacacacacagaacagtcaaccaacatatcacttactggagcattaaatttcatattcccatggcaatagtgggctgcaaggaattcnatatcaagcttatcgatacccgncgacctcaaggggggccccggacccacttttggtcctttantgangggtnaatgccccttgc

SEQ ID NO: 546 - DNA, 19 bp, Oreochromis niloticus
gcagatggctaagaacctc

SEQ ID NO: 547 - DNA, 21 bp, Oreochromis niloticus
tttaatgctccagtgagtgat

SEQ ID NO: 548 - DNA, 660 bp, Oreochromis niloticus
  misc_feature 6, 7, 17, 18, 28, 35, 41, 416, 523, 541, 546, 562, 567,573, 580, 582, 584, 586, 595, 604, 610, 622, 624, 636, 643, 646, 649, 651, 653: n = A,T,C or G
ttgaanncctttgaaanncccgcggtgntgggcgntctagnactagtggatccccccctcatctctgtctctctctctctccctctgtttccatctcatatactctccagctttggcaggcacacacacacacacacacacacacacacacacacacacacacacacacacatatatatatgcactctccacagggatccaaactattacagtatagagctctatgccatctggctgaggaggtatggacaggtatcagacaaaaacccacacacgcacgcatatcatatcaccctgagccaacagcaatattaagctgagctctcccactgtgcatgtgtgtccacacccttttcagtgtttcaaaatgggggctgcaggaattcgatatcaagcttatcgataccgtcgacctngagggggggcccggtacccagcttttgttccctttagtgaggggttaattgcgcgcttggcgtaatcatggtcttagctggtttccttgggtggaaaaatttgttantcccgtttcacaaatttncacanctaaccattaccgaanccctntaagcntttaaanangntngtaaaagcncctgggggngttgcnctaaaaggaatngnggacgctttaanttcatanttnaantngngggggtc

SEQ ID NO: 549 - DNA, 18 bp, Oreochromis niloticus
ccctctgtttccatctca

SEQ ID NO: 550 - DNA, 21 bp, Oreochromis niloticus
gatacctgtccatacctcctc

SEQ ID NO: 551 - DNA, 409 bp, Oreochromis niloticus; identical to SEQ ID NO: 314
  misc_feature 257: n = A,T,C or G

SEQ ID NO: 552 - DNA, 20 bp, Oreochromis niloticus
atcagattggatgggaggtg

SEQ ID NO: 553 - DNA, 21 bp, Oreochromis niloticus
aatatgaaatgcgcatgtgtg

SEQ ID NO: 554 - DNA, 526 bp, Oreochromis niloticus
  misc_feature 9, 12, 13, 14, 21, 42, 74, 447: n = A,T,C or G
ttgagatcnctnnnaagcccntcctttgggtaacgtcccacnactagtggatcccccaaaaagtctctttcgtnccattgggtgttcaaataaagaagggctaattttattcaaatcaaggcttcctgcttctcactgtgtgtttctcttattctctttcttattgttgcgcaggcacacacacacacacacacacacacacacacacacacggacattagcatacacattgccaccaccgagtcaggcttaattgaaaagcatcttttaagaatgttaagaagtgccctgttagccgggggagaggataaaggctgttacattattcagggcacttgaattgggtttcaccagcgtcggtttccttctgctttgattgggttttgtcttgtggttttttgggggctgcaggaattcgatatcaagcttatcgataccgtcgacctngagggggggcccggtacccagctttttgttccctttagtgagggttaattgcgcgcttggccgtaatcatggtcatagc

SEQ ID NO: 555 - DNA, 20 bp, Oreochromis niloticus
ccattgggtgttcaaataaa

SEQ ID NO: 556 - DNA, 20 bp, Oreochromis niloticus
ggctaacagggcacttctta

SEQ ID NO: 557 - DNA, 227 bp, Oreochromis niloticus; identical to SEQ ID NO: 315

SEQ ID NO: 558 - DNA, 20 bp, Oreochromis niloticus
ccgacagtcagctcagatca

SEQ ID NO: 559 - DNA, 20 bp, Oreochromis niloticus
aaccctgttggctgtctcac

SEQ ID NO: 560 - DNA, 629 bp, Oreochromis niloticus
  misc_feature 6, 24, 33, 40, 108, 419, 556, 616, 628: n = A,T,C or G
ttgaancccttggattcccgcggnggttgccgntctaganctagtggatcccccccactcaaagccgagaactggatttatatggatgtgtgtgcgtgagaacgatgntactgccgagtccctggactttctcactgaagggtgctgtgtttactgcagttagccgagtcccttcagcatgtcgtcacaggggagaagtgtttaatagggatgtttgtattcctgcactgctgctgatttgagattagagctgaactgttgagcgggggatatgcgcacacacacacacacacacacgcaccatcctgaggggctttgttgcaatattaaggcgggtaagtatcagccgcatatagtatttagggggtctcatccagccccttgaccctgtgcctgtctgtgtgggctgcaggaattcnatatcaagcttatcgataccgtcgacctcgagggggggcccggtacccagcttttgttccctttagtgagggttaattgcgcgcttggcgtaatcatggtcataagctgtttcctgtgtgaaaattggtatcccgtnacaattcccacaacatacgagccggaagcataaagtgtaaagctgggggtgcctaatganttgagctacttnc

SEQ ID NO: 561 - DNA, 19 bp, Oreochromis niloticus
caaagccgagaactggatt

SEQ ID NO: 562 - DNA, 21 bp, Oreochromis niloticus
tggatgagaccccctaaatac

SEQ ID NO: 563 - DNA, 600 bp, Oreochromis niloticus
  misc_feature 2, 14, 30, 35, 600: n = A,T,C or G
tntttgacgccttngatccccgcggtggtngccgntctagaactagtggatcccccacccgttgagtgccgtgctctcccctgggaacacaagcacagctgagagtaaatggcaattactgtgtttaactgttttatccgcgctcagaggcaaccatacatcgcagattccacagaacatcattaaaacacacttagatacacgcacacgagcactgcgctcgtacgcacacacacacacacacacactcactgtcacatcacgtctggtggcttattcatgcctgtcacatcgtcatttactcaaccatgatggagtgatacaaataccggcagacatatttcaatattctgctggagcaaattatgatgggctgcaggaattcgatatcaagcttatcgataccgtcgacctcgagggggggcccggtacccagcttttgttccctttagtgagggttaattgcgcgcttggcgtaatcatggtcatagctgtttctgtgtgaaattgttatccgctcacaattccacacaacatacgagccggaagcataaagtgtaaagcctggggtgcctaatgagtgagctaactcacatttan

SEQ ID NO: 564 - DNA, 18 bp, Oreochromis niloticus
cgcagattccacagaaca

SEQ ID NO: 565 - DNA, 21 bp, Oreochromis niloticus
ccggtatttgtatcactccat

SEQ ID NO: 566 - DNA, 632 bp, Oreochromis niloticus; identical to SEQ ID NO: 316
  misc_feature 6, 12, 28, 36, 490, 504, 510, 548, 551, 569, 573, 576, 577,580, 599, 616, 621, 622, 623, 628, 629: n = A,T,C or G

SEQ ID NO: 567 - DNA, 20 bp, Oreochromis niloticus
cgctcgttacagtcaaaacc

SEQ ID NO: 568 - DNA, 21 bp, Oreochromis niloticus
atacaggaaggagacgcattc

SEQ ID NO: 569 - DNA, 655 bp, Oreochromis niloticus
  misc_feature 3, 4, 5, 7, 8, 10, 11, 12, 14, 15, 18, 20, 23, 32, 33, 42,43, 48, 58, 110, 532, 537, 542, 544, 550, 555, 559, 563, 568, 569, 583, 586, 589, 590, 595, 596, 597, 599, 630, 633, 639, 643, 649, 650, 651, 652, 653, 655: n = A,T,C or G
ggnnntnngnnnannttntnttnttacatggnngatcttatnnaaatnccccggcccnttctggaggtcgacggtatcgataagcttgatatcgaattcctgcagcccanctctgttcctcggtcaagctctctggcacttctcaccttcaggtaaaaaaaaaaagaaaaaaaaaagtcaggcatactctgtccatccatctatctatccatcaatccatccatcattcatccagccatcaatcctctgtcacccatagtcgacttcaggctcttggctgtgtttaatggttgtattttattgccgggctgtgtctcctgccttccccgttggtcgtcccactgtgtaaccgttcagccttggtctgcgggctctgttaatctgctgcttaattagtgttgatgaatggctcagtgtgtatggatgtgtgtgtgtgtgtgtgtgtgtgtgtctgtgtgcatgcgtacaagtgagcacgtgtgtgctggttttggctttgtgtgtgtgtgtgtttgaatgaattcgtgtgtgngtggngcatnancccccnggggngttntttntgttnnttgggtgggggganccnttnnttttnnnanggggccccacccgggggggggggactgcaanttncccttntaangggggnnnnntn

SEQ ID NO: 570 - DNA, 21 bp, Oreochromis niloticus
tcaatcctctgtcacccatag

SEQ ID NO: 571 - DNA, 18 bp, Oreochromis niloticus
aaagccaaaaccagcaca

SEQ ID NO: 572 - DNA, 654 bp, Oreochromis niloticus; identical to SEQ ID NO: 317
  misc_feature 2, 3, 4, 5, 6, 7, 10, 13, 19, 24, 28, 30, 31, 33, 36, 38,40, 50, 72, 79, 82, 85, 146, 148, 151, 169, 175, 178, 559: n = A,T,C or G

SEQ ID NO: 573 - DNA, 18 bp, Oreochromis niloticus
gtggtccaaatggctgac

SEQ ID NO: 574 - DNA, 21 bp, Oreochromis niloticus
cgcttttctgcttatgtgttc

SEQ ID NO: 575 - DNA, 606 bp, Oreochromis niloticus
  misc_feature 6, 13, 19: n = A,T,C or G
ttgatncccttgnaacccncggtggcggccgctctagaactagtggatcccccatctaatctcacatggcaatattttatcaatagtgtatcacctgatattacatattaactgacaggatcaagtgctgacagtgcctaagaactgctttacagtgctactaacagtatgtgagatgggtgtaggtgagattttaatattcaccaagccaaattactttcagaaaaagactctaaaacaatccttcgggctaaacaaaagcctctcagtttgtccttgtgcagaaaaagcgataaatcggtatataaaagcagcacagaataatgcatttccaccatagccacaagctgctatacaattctccagaacattacaagcccagcaggatgttcacaatcaaaaaataccacacacacaaacacacacacacacacacacacacacacacacacacacacaaacacactcagaagtgaatggaaaagccaacatcttagaaataaacacaatacaaatgggggctgcaggaattcgatatcaagcttatcgataccgtcgacctcgagggggggcccggtacccagcttttgttcctttagtgagggc

SEQ ID NO: 576 - DNA, 18 bp, Oreochromis niloticus
caatccttcgggctaaac

SEQ ID NO: 577 - DNA, 21 bp, Oreochromis niloticus
ttctaagatgttggcttttcc

SEQ ID NO: 578 - DNA, 570 bp, Oreochromis niloticus
  misc_feature 516, 517, 542, 559, 563, 567, 570: n = A,T,C or G
gaagcccgttgctccccgcggtggcggccgctctagaactagtggatccccccctcttcaggggcagaggacatcaagtgtgtttgtgtgtgtgtgtgtgtgtgtgtgtgtgtgtgtgcgcagagagagagagatacagacagacccacacatgtcatgtcgagaccaccggtgcagacattagtgtgtgagggtcagtgaacaggtcaggaggtatttgctcgacagtgttggacttgatcacgatgtcctgtaatgtggaatttgtgtgtgtagtctacgtgtgcatgtgactctagaggtcagaagcacatgttgttatttttccactttgaacaagttaaaaattatactcatccttctcttccaaactagaacggacagacatcaagcgcacttaactctttacagtaaatacttcggctcacatgtccgtcttggatcattgcccatttattcattttgcactttaagatctcacccgatactttatctaaattaagacctttttcttannttgggccttgcaggaaattccattntaagccttattcgaatnccgncganctn

SEQ ID NO: 579 - DNA, 17 bp, Oreochromis niloticus
ggggcagaggacatcaa

SEQ ID NO: 580 - DNA, 21 bp, Oreochromis niloticus
caacactgtcgagcaaatacc

SEQ ID NO: 581 - DNA, 833 bp, Oreochromis niloticus
  misc_feature 2, 16, 17, 18, 19, 20, 23, 24, 25, 26, 27, 33, 41, 43, 572,577, 589, 614, 619, 633, 658, 669, 670, 675, 676, 678, 692, 704, 711, 720, 731, 741, 758, 789, 791, 797, 816: n = A,T,C or G
angtggtttttttttnnnnnttnnnnntttganggcctttnangcggcccggccgctctagaactagtggatcccccacaataaacattatccacacaccttaaaactaactaaacacacacacacacacacacacacacacacacacacacacacacacacacacacacacacacacaggctctgaaaccatcagtccaacccagaagtttttctttgttgatttatatgttttatactggaaaaaactatcagagaagtatgcatgtccctagggagacctccagagacaggctgtttttcatgacactttttcccacccatcggagcagtaacagacaaacaaccttttcttggaaaaaaggttgatactgttccttgccaggttagtcaatttcaaccctagtcagctatgtgtgtgtaaaggtggatgcacaacaaccaattacagaggaaagaatttagtctctgtgctcaaagttatttgggctgcaggaattcgatatcaagcttatcgataccgtcgacctcgagggggggcccggtacccagttttggttccttttagtgangggtnaatgcgcccttngcgtaatcatgggcatagctggttncctgngggaaaatggtatncggttacaattccacaacatttcgngcccggaagcnnaaagnngnaaacctgggggtgntaaatgagggancttaccnacataaatngggttgggctnactgggccgnttttcagtgggaacctntcgtgccacttgattaatgaatcggccaacncncggganagggcgtttgccctatggnggcttttcgcttctgct

SEQ ID NO: 582 - DNA, 21 bp, Oreochromis niloticus
acaataaacattatccacaca

SEQ ID NO: 583 - DNA, 20 bp, Oreochromis niloticus
gactagggttgaaattgact

SEQ ID NO: 584 - DNA, 377 bp, Oreochromis niloticus
acattcaggactataatatgtgtttttaggattcaccccccttctctctcacgtgtcctctttgcaggaaaagtctgtttatttccttcttggctgtaggaagtgtgtgtcctccctgcaagtggatcagcttccctgtgggtggaggtgactcgtgttctcactgctgtggcaggcaaaggtgccaaatgcacacacacacacacacacacacacacacacacacacacacacacacacacacacacacacacacacacacacacaggatcaagacctggacagtgtggagggctaagctctgctgcttctatgcagccttcagggctacattacaggttgtcccaaacttaaccctgtgcctgttagctaactat

SEQ ID NO: 585 - DNA, 21 bp, Oreochromis niloticus
ttatttccttcttggctgtag

SEQ ID NO: 586 - DNA, 20 bp, Oreochromis niloticus
taagtttgggacaacctgta

SEQ ID NO: 587 - DNA, 596 bp, Oreochromis niloticus
  misc_feature 2, 4, 5, 7, 9, 10, 12, 18, 20, 23, 24, 44, 55, 59, 78, 82,513, 542, 548, 565, 569: n = A,T,C or G
gngnngnanntnatttgntngannaaggaacatggaggaacccncgcttctttangagnaccaccgtatcgataagcngganatcgaattcctgcagccccttggcaaagcttccagtggggaggggggggatacagactcgatgaggcatttttttccccaggtaagaaaaatagaaggctgactctaaacagactgtgagcagatggtggattactgtgtcaagaattataactggtaaatattacaaatgagatacaacacacacacacacacacacacacacacacatacacacacacacacacacacacacacacacacacacacacacacacaaataggctactgagaaagatgctagctattgatcagctgggatttgagtcttcctttatgattactgtgacagcagtgcttatcattgtgcaataacaccagtctgtgcttcccacagtaatcactctggagccaagtgttatgtctactagctgaatggaaaattgcagaggnggaatattcacccccacacactttgaaancaaaanctttgcctggggggccncaanaactcacaactaaaggcccatttgcat

SEQ ID NO: 588 - DNA, 21 bp, Oreochromis niloticus
gtgagcagatggtggattact

SEQ ID NO: 589 - DNA, 19 bp, Oreochromis niloticus
ggaagcacagactggtgtt

SEQ ID NO: 590 - DNA, 363 bp, Oreochromis niloticus
tcaggtatggacttatgcaccttctttgtcacacctttctgcaactctgttagttggctaacctcccttcgtgctactttgatcttgccctctagcctccttctccatggagggtactgccccttgtggctgttcaacttgtagccaagcagctcactgatcactgctgccgtagtgtagatcagcttgttagtgtcggtaatcgtggttgtaggtatctgcttttgtcttgcactgtccacttttttgcaatgacaatgcagattttccacttttgggacaaatacatgcagatttactgtatgtgtgtgtgtgtgtgtgtgtgtgtgcaacattggcatttgtttactcagatccaaggca

SEQ ID NO: 591 - DNA, 20 bp, Oreochromis niloticus
gctgccgtagtgtagatcag

SEQ ID NO: 592 - DNA, 21 bp, Oreochromis niloticus
tgccttggatctgagtaaaca

SEQ ID NO: 593 - DNA, 792 bp, Oreochromis niloticus; identical to SEQ ID NO: 318
  misc_feature 493, 549, 614, 622, 627, 631, 632, 643, 683, 686, 706, 712,719, 734, 737, 740, 757, 758, 759, 763, 785, 788: n = A,T,C or G

SEQ ID NO: 594 - DNA, 17 bp, Oreochromis niloticus
ggagcgagatgggtttg

SEQ ID NO: 595 - DNA, 21 bp, Oreochromis niloticus
gctgcgtctgtttactacaca

SEQ ID NO: 596 - DNA, 806 bp, Oreochromis niloticus; identical to SEQ ID NO: 331
  misc_feature 3, 4, 5, 12, 13, 14, 17, 30, 39, 463, 515, 532, 548, 616,642, 649, 650, 658, 663, 665, 680, 694, 712, 725, 730, 733, 748, 749, 752, 757, 761, 768, 771, 774, 775, 782, 785, 788,804, 806: n = A,T,C or G

SEQ ID NO: 597 - DNA, 21 bp, Oreochromis niloticus
agtttccttttacactgctcc

SEQ ID NO: 598 - DNA, 18 bp, Oreochromis niloticus
tccacgggttactgaaga

SEQ ID NO: 599 - DNA, 611 bp, Oreochromis niloticus
  misc_feature 8, 11, 14, 489, 519, 561, 562, 611: n = A,T,C or G
tgtgtctnccnccngattttttgcatcccgccccctttcgaggtcgacggtatcgataagcttgatatcgaattcctgcagcccccacgcccctgatatggaacctttaagccttgacagagtttacacaggtgagttatgaaaatatgcaccacactggtgcattctgggaatattgtggtttttcagttatcagcagtgggtggcggctttggcttagtgccatctccataaacacacaaaagcatcggcgtgcctctcatggatactgctggcgttgccatggaaacatgtgaggagaaactgcagaatataggatcaactgtagctccccccaccaccaccacacacacacacacacacacacacacacacacacacacacactatgaatgattatgcaaatgaagcgacggagacctgctgtagcgttcagacgctccgaggctcctttatgtctccacctgctccagccttcacacagcactncgactgaccgagcagaccaatcagcacctncacatactctcacatgacctttcatcgctttagctgaagccnncagtgcacaggcactaatctacctttgcctctaaaacacacgagggctn

SEQ ID NO: 600 - DNA, 21 bp, Oreochromis niloticus
tagtgccatctccataaacac

SEQ ID NO: 601 - DNA, 17 bp, Oreochromis niloticus
gtctccgtcgcttcatt

SEQ ID NO: 602 - DNA, 288 bp, Oreochromis niloticus
cagctacactattagagagtgaacatttgactgaaacatgactgcaggagacatgatataatcaatgaatcagtgtgtgtgtgtgtgtgtgtgtgtgtgtgtgtgtgtgtgtgtgtgtgtgtgtgacattattacagaataatttaactgaaatatgtctggaggagagctcgaacagaacaacattaaactgaatcactgccgaagtgttttctctcctctgctgaaagtttaatgtcgggtttgtccttgctgacttttgtcagcagcttcttagataacatccgg

SEQ ID NO: 603 - DNA, 20 bp, Oreochromis niloticus
ctgaaacatgactgcaggag

SEQ ID NO: 604 - DNA, 21 bp, Oreochromis niloticus
cccgacattaaactttcagca

SEQ ID NO: 605 - DNA, 540 bp, Oreochromis niloticus
  misc_feature 3, 6, 21, 22, 23, 25, 33, 38, 43, 56, 59, 70, 71, 85, 111,114, 495, 504, 539: n = A,T,C or G
atnttnttactatttatcttnnnanttctcttncttantgggnaaaggcttctganctngtggatccccnncaacaaacagacantttgacagatgcacacacgcacagtnggncagactccgatattcatcacgtttaactcatacaaatttaatgcatgcatgaacacacatgtaaatgcacacatgtatgaacatctggacatgtaagaaagcctaggtgtgcataacacacacgcacacacacacacacacacacacacacacacaaacatgcacacacatgcacgtatgccggtccatttacactgtggcgacagtgagtctgttagcgggatgccatagtgggctgcaggaattcgatatcaagcttatcgataccgtcgacctcgagggggggcccggtacccagcttttgttccctttagtgagggttaattgcgcgcttggcgtaatcatggtcatagctgtttcctgtgtgaaattgttatccgntcacaattncacacaacatacgagccggaacataaagtgtaaant

SEQ ID NO: 606 - DNA, 21 bp, Oreochromis niloticus
ccgatattcatcacgtttaac

SEQ ID NO: 607 - DNA, 18 bp, Oreochromis niloticus
atcccgctaacagactca

SEQ ID NO: 608 - DNA, 598 bp, Oreochromis niloticus
  misc_feature 1, 10, 12, 23, 83, 431, 571: n = A,T,C or G
ntttgacaancnttgggtaccgngccccccctcgaggtcgacggtatcgataagcttgatatcgaattcctgcagcccccatnttcacagttaaccagcgcctgctgacaaacgacagtagcggttttgcagctgggagatgaatcagaccgtcataacttaacatgtggtcgcctgcaaacggtgacatcttcgcaacttcgatgccaaatgagcctgttgtctgcacgccaatgcaaaagccactcactcacacacacacacacacacacacacacacacgaataaagagacggatccgctggttaggcatgccatgcagattcgcacctgcacacgccagatagccaaatccaacgcaagttgcaaaaacaagccccgcatttcggaaaatcatgccataacgtttactcataatcacaccgggcttncagctagcaaccttaactagcagcatatctgctagcatcgccaagaagggggggatccactagttctagagcggccgccaccgcggtggagctccaattcgcctatagggagtcgtattacgcgcgctcactgggccgtnttttacaacgtcgtgactgggaaaacc

SEQ ID NO: 609 - DNA, 21 bp, Oreochromis niloticus
aacggtgacatcttcgcaact

SEQ ID NO: 610 - DNA, 21 bp, Oreochromis niloticus
gatttggctatctggcgtgtg

SEQ ID NO: 611 - DNA, 560 bp, Oreochromis niloticus
  misc_feature 6, 482, 483, 546: n = A,T,C or G
atcttnacagttaaccagcgcctgctgacaaacgacagtagcggttttgcagctgggagatgaatcagaccgtcataacttaacatgtggtcgcctgcaaacggtgacatcttcgcaacttcgatgccaaatgagcctgttgtctgcacgccaatgcaaaagccactcactcacacacacacacacacacacacacacacacgaataaagagacggatccgctggttaggcatgccatgcagattcgcacctgcacacgccagatagccaaatccaacgcaagttgcaaaaacaagccccgcatttcggaaaatcatgccataacgtttactcataatcacaccgggcttccagctagcaaccttaactagcagcatatctgctagcatcgccaagaaggggggggatccactagttctagagcggccgcaccgcggtgggagctccaattcgcctatagtgggttcgtattacgcgcgctnntggcccggcggtttacaacggtcgtgactgggaaaaccttgggcgttacccaacttaaatcgncttgcagcacatct

SEQ ID NO: 612 - DNA, 18 bp, Oreochromis niloticus
atgccaaatgagcctgtt

SEQ ID NO: 613 - DNA, 21 bp, Oreochromis niloticus
cccggtgtgattatgagtaaa

SEQ ID NO: 614 - DNA, 347 bp, Oreochromis niloticus; identical to SEQ ID NO: 319

SEQ ID NO: 615 - DNA, 17 bp, Oreochromis niloticus
agacagccatgccaagt

SEQ ID NO: 616 - DNA, 21 bp, Oreochromis niloticus
tttctgacccattaaaactga

SEQ ID NO: 617 - DNA, 602 bp, Oreochromis niloticus
  misc_feature 3, 6, 9, 20, 27, 35, 77, 549, 551, 578, 588, 592, 595: n = A,T,C or G
ttnganctnttggaccttcngaccccntctggagntcgacggtatcgataagcttgatatcgaattcctgcagcccntcagatttacagtctatacttcatattctgatggagtgggaaagaaaagcaggacaggcgcaggacacacacacacgcacacacacgcacgcacacacacacacacacacacaccttatggaagctattagttctgataactattattacttcctaatcatcctagtgtcatgttgaacacttcacaggagtgagaagcttgcaaatctaagcaggcaggtgtcaaagcaaaaaaaaaaagaagaagaagaaaaaaaggaagaaaaaaatgctgtaatgttgcaataatgtgcaggcagctgaggagaaaatgactgcccagatacagactgcagctaagtgattcagaagaagaggctagcgagctttgactgaagcagatggcctctgttataaaaaagtgcattaaacacaaagatcttcttactttacccacagaaagataaagttgatgccgttttatgaaccctgngnggatataaagagcccactattgggaantatggacagngctnctntccatgg

SEQ ID NO: 618 - DNA, 20 bp, Oreochromis niloticus
tcatattctgatggagtggg

SEQ ID NO: 619 - DNA, 21 bp, Oreochromis niloticus
gtatctgggcagtcattttct

SEQ ID NO: 620 - DNA, 814 bp, Oreochromis niloticus; identical to SEQ ID NO: 321
  misc_feature 3, 33, 53, 478, 493, 600, 610, 614, 640, 658, 660, 666,687, 689, 713, 714, 720, 740, 744, 758, 766, 767, 770, 772, 778, 795, 813: n = A,T,C or G

SEQ ID NO: 621 - DNA, 21 bp, Oreochromis niloticus
gtttatctcggctaactgagg

SEQ ID NO: 622 - DNA, 17 bp, Oreochromis niloticus
gtcccagaatggcaaca

SEQ ID NO: 623 - DNA, 610 bp, Oreochromis niloticus
  misc_feature 2, 3, 4, 7, 8, 9, 10, 11, 12, 13, 14, 17, 19, 23, 25, 36,44, 53, 60, 61, 65, 75, 136, 137: n = A,T,C or G
gnnnggnnnnnnnnttnantttntntaagtgatagnagatcttnagggaaacnccgttcnntttngaggccgacngtatcgataagcttgatatcgaattcctgcagcccacattcttagttcaagcagtattatnnaagccattcctttgatcctgagcacctctaaccactttgtgttgggggaggctttattgtagatacatcctatctagaagatctgtttcttgtgttgtaagcttcctgcttttatgacccttttggtcagcaggaggtcacacaaacgcacacacacacacacacacacacacacacacacacacacacacattcttacttacatacagaagttcacacatacacatacaaagccttgtcttagaaccatgtgggcgttgctttgctgtgtgaactgtctctcaataaaaggcagcaggaggagggggggatccactagttctagagcggccgccaccgcggtggagctccaattcgccctatagtgagtcgtattacgcgcgctcactggccgtcgttttacaacgtcgtgactgggaaaaccctggcgttacccaacttaatcgccttgcagcacatccccctttcggcag

SEQ ID NO: 624 - DNA, 20 bp, Oreochromis niloticus
ttgggggaggctttattgta

SEQ ID NO: 625 - DNA, 20 bp, Oreochromis niloticus
gcccacatggttctaagaca

SEQ ID NO: 626 - DNA, 629 bp, Oreochromis niloticus
  misc_feature 1, 2, 3, 4, 5, 6, 9, 10, 11, 12, 13, 14, 15, 16, 17, 18,19, 20, 24, 25, 28, 30, 32, 37, 40, 50, 52, 57, 62, 545, 615: n = A,T,C or G
nnnnnnggnnnnnnnnnnnnttannttntntntttgnagnggatcttaangngaacnctccnccctttcgaggtcgacggtatcgataagcttgatatcgaattcctgcagccccctgaaaatcttccttgatgaactgcactaagaatagggtcctttatgagtctcattaccaaacccaaactgtttcaggcagagctgtgcgagacaccccgacaagtcctggtaattatctttagtgagcggagcgcgacacactgctgtcgcttcatgaacacatagcacagagctaaccgctcagagagattacaggctcatgtgcatcaaagacgagcacgcactcacacacacacacacacacacacacacacacacacacacacacacaccgtttaatacacatgtccactttgctgatgtaaaccaatttttttctttttttgggggatccactagttctagagcggccgccaccgcggtggagctccaattcgccctatagtgagtcgtattacgcgcgctcactggccggtcgttttacaacngtcgtgactgggaaaaccctgggcgttacccaacttaatcgccttgcagcacatccccctttcgcagctnggcgtaatagcgaa

SEQ ID NO: 627 - DNA, 17 bp, Oreochromis niloticus
tcgggtcaagccaaaac

SEQ ID NO: 628 - DNA, 21 bp, Oreochromis niloticus
actgctccccactgtaatcat

SEQ ID NO: 629 - DNA, 612 bp, Oreochromis niloticus
  misc_feature 2, 4, 7, 8, 9, 11, 12, 18, 19, 20, 27, 34, 53, 118, 123,487, 521, 528, 545, 571, 576, 580, 588, 589, 597, 601, 602, 607, 612: n = A,T,C or G
tntnttnnncnnctagannnttttggncttcccnccccctttcgaggtcgacngtatcgataagcttgatatcgaattcctgcagccccttttgtttcgcggtgtctgaagtgaatgngacantgaataaacagccctcaaccctgagctcctcgctcaacttagggaacgagcgtgcgctttgaaacaaatgcagagaggctgacacgcaccaatatataaatggacacacacacacactgagggaggcatttagctcgatgcactaccagcaagtagtgacacatgtggctcagagggagtaagctgctggaggagttggcaagcagctggaagtcttgctggcatgcctcactgctaaactatgcacaagtagaaacgcacacacacacgcacgcacacacacacacacacacacacacacacacacacacacacacacacaggttcgaccatgtttcttctcttcaccttagcacccacctcntcagtgggggatccactagttctagagcggccgncaccgcngtggagctccaatttcnccctatagtgaggttcgtattacgcnccgcntcanttggccgnntgttttanaacnnttggnggacn

SEQ ID NO: 630 - DNA, 17 bp, Oreochromis niloticus
gaggtgggtgctgaggt

SEQ ID NO: 631 - DNA, 21 bp, Oreochromis niloticus
gagtaagctgctggaggagtt

SEQ ID NO: 632 - DNA, 304 bp, Oreochromis niloticus
atgcttcccaaaggcttcttgaagcttaaatgattgtagcacatggaattacaatcacattaagattatcttagccttgaaggaatagtttgacattttggcagattttgcttattggattttcttgctaaaagttaaagcccttttacagagagagtatttcacaatatttaaacaggcgggtgacgaattaaagttttatgtgtgtgtgtgtgtgtgtgtgtgtgtgcgtgtgtgtgtgtgtgtgtgtgcagtcttataaagcctttgccaaatcaaacatgcagatcatcaaaaatgagat

SEQ ID NO: 633 - DNA, 21 bp, Oreochromis niloticus
ttggcagattttgcttattgg

SEQ ID NO: 634 - DNA, 20 bp, Oreochromis niloticus
catgtttgatttggcaaagg

SEQ ID NO: 635 - DNA, 699 bp, Oreochromis niloticus
  misc_feature 2, 3, 5, 6, 7, 13, 19, 23, 25, 33, 43, 44, 61, 538, 543,554, 561, 584, 592, 597, 605, 607, 610, 615, 618, 629, 630, 636, 642, 643, 649, 651, 655, 656, 662, 663, 681, 686, 690,695, 696: n = A,T,C or G
gnntnnnacttcntctttnactnangatctttntgaaagcccnnccgctttggcggccgcnctagaactagtggatcccccacagagcgcagaggaaggctgtgtgaggcgtgtaatgctaaattatttgatcactgaaactagaaatgtatggtatgtttgaacatgcttatacacacaaagcgtgcacatacacacacacacacacacacacacacacacacacacacacacacacacacacacacggtaaaccataaacttccacattacagattcatttgctcatttgagcaaatctgcgtttggtccacccaccgctcttgaagggtcagtcttatgaaacaattgcgtatttaatgaggctctgcatacaagcaactctgtgcacgagctcaaacacacacatacacattcccatacacactcattatgtacgcagtgctcccactcagtgggctgcaggaattcgatatcaagcttatcgataccgtcgacctcgagggggggcccggtacccagcttttgccccctttanggganggggttaaatntgccccncttgggccgtaaattcatggggnaataagcntggtnttccctgngntgnaaaanctnggttttccccnnttcacnattttnncccccnancttnngggaannccggaaaaccttttaaanttttnaaanccccnngct

SEQ ID NO: 636 - DNA, 21 bp, Oreochromis niloticus
tgtgaggcgtgtaatgctaaa

SEQ ID NO: 637 - DNA, 17 bp, Oreochromis niloticus
aagagcggtgggtggac

SEQ ID NO: 638 - DNA, 620 bp, Oreochromis niloticus
  misc_feature 14, 19, 27, 412, 524, 539, 547, 569, 592: n = A,T,C or G
ttgattccttggantaccncggtggcngccgctctagaactagtggatcccccacaattacatgtaaatactttattctgtcctctccacaccctccatcaggataaagagaaggtgagtctcccatagtgcatttcaggtgtgtgtgtgtgtgtgtgtgtgtgtgtgtgtgtgtgtgtgtgtttaacggtcagcgtgtgcaggtggaggtcgaggagtcgagcggcgacgggcagatccacagtctggaccctcagctggagcggcaggtggagatagtcaggaacctggtggactcgtaccttgccattatccaccgtaccatcagggacctgatccccaagaccatcatgcacctgatggtcaacaatgtacgacacacacacatacacaagggggctgcaggaattcnatatcaagcttatcgataccgtcgacctcgagggggggcccggtacccagcttttgttccctttagtgagggttaattgcgcgcttggcgtaatcatggtcatagctgtttnctgtgtgaaattgtnatccgctnacaattccacacaacatacganccggaagcataaagtgtaaagcntgaggtgccctaatgagtgagctaactc

SEQ ID NO: 639 - DNA, 21 bp, Oreochromis niloticus
cctccatcaggataaagagaa

SEQ ID NO: 640 - DNA, 17 bp, Oreochromis niloticus
actcctcgacctccacc

SEQ ID NO: 641 - DNA, 324 bp, Oreochromis niloticus; identical to SEQ ID NO: 373
  misc_feature 8, 167, 246, 269: n = A,T,C or G

SEQ ID NO: 642 - DNA, 19 bp, Oreochromis niloticus
actgcctcctacccaccaa

SEQ ID NO: 643 - DNA, 20 bp, Oreochromis niloticus
gcaaggcttgtttccatagc

SEQ ID NO: 644 - DNA, 598 bp, Oreochromis niloticus
  misc_feature 3, 4, 6, 12, 15, 18, 75, 495, 593: n = A,T,C or G
ttnnanaccttnganccnggccccttctcgaggtcgacggtatcgataagcttgatatcgaattcctgcagcccntaggggaggcgggtgtcagctgagaccatcagtcatgcatggacgctgctgtgtggctctgtggatgtgataaaaaccaaagcagagcactgcaaacaactgctgctgtgcacgcacacacacacacacacacacacacacacacacacacacacacacacacacacacacacacacacacggatacacataaacagtcaattatcagtgaaatagcacaacactctctttcttctgtatactgtttccctttcagtctcttccacatcacgtcgtgttcccgactctctccccgtcactctctgttcccctcccctctccctttctctctgcaatctctcatcatcgctttagcacattaattgactcattattccaattcgtggggggatccactagttctagagcggccgccaccgnggtggagctccaattcgccctatagtgaagtcgtattacgcgcgctcactgggcccggtcgttttacaacggtcgtggactgggaaaacccttggcgntacct

SEQ ID NO: 645 - DNA, 19 bp, Oreochromis niloticus
gctgctgtgtggctctgtg

SEQ ID NO: 646 - DNA, 21 bp, Oreochromis niloticus
aacacgacgtgatgtggaaga

SEQ ID NO: 647 - DNA, 576 bp, Oreochromis niloticus
  misc_feature 462, 504, 507, 510, 575: n = A,T,C or G
acatcagcggctgagtgaacatcggctcgtccatctcgttatgacccatccgacggtaacacacctgcgcacacacacacacacacacacacacacacacacacacacacagtaaggactgtttccaggtgtgtgaacaggtaggagcagactccagatgatggatgtgtgtcagagaggagagacgcagggaaacagtcgcctctgaggtctgctgtgacttcacacagtgaaataaaatatataatgtcataaataataacgtgtctgctcatagctttacctgctgagcatagcaacatgtagggaggagcaaatgtgctaaaaaaaaaattaaataaccaacaaagagccaagacaggaagagggaggaaacatgatgacatcattgaaaacaaaaatgaaaaaaggaaacaaaaattaatttaacatcagaaacaaacgttctataaacgtgtgtgngtttttactggaccaggttgacccaccaacgtcttttgtggnaanggnggcttttccactcggggggcttgcaaggaaattccgaatttcaaagctttatcggataacccgtng

SEQ ID NO: 648 - DNA, 16 bp, Oreochromis niloticus
ggctcgtccatctcgt

SEQ ID NO: 649 - DNA, 21 bp, Oreochromis niloticus
cttggctctttgttggttatt

SEQ ID NO: 650 - DNA, 622 bp, Oreochromis niloticus; identical to SEQ ID NO: 322
  misc_feature 8, 25, 28, 31, 82, 455, 471, 512, 555, 562, 569, 596, 608,615, 619, 620: n = A,T,C or G

SEQ ID NO: 651 - DNA, 18 bp, Oreochromis niloticus
tgcattcatcccatcacc

SEQ ID NO: 652 - DNA, 21 bp, Oreochromis niloticus
tttaacgagtctggcatctga

SEQ ID NO: 653 - DNA, 828 bp, Oreochromis niloticus
  misc_feature 3, 4, 19, 26, 32, 45, 61, 505, 516, 528, 556, 578, 580,584, 592, 596, 608, 630, 636, 640, 646, 660, 669, 676, 682, 685, 686, 696, 709, 714, 717, 718, 720, 765, 767, 780, 781,784, 786, 793, 804, 812, 813, 815, 816, 824: n = A,T,C or G
ttnnaatccctttgcaatngcccttncggtcnacggtatcgatcngcttgatatcgaattnctgcagcccactaggaaatcatttgtgccctttgtattgtttatttatgcactctagttggcgtaggcaaacagaaatggtccgcaatatatgctcccacaaataggcacaggcacgcgcacacacacacacacacacacacacacacacacacacacacacacacacacaggggggtttatggaagcaagtggtgacacgctgtggacaggtttcgagaggtttagcgacatgtgtggtctaaagttagcgcagttggagaatgccttccatctttgcgtccatccatccctgagcgtaccctcctctccagctgtctccatctcatcccctgacctgagctgctgtcaggggggggatccactagttctagagcggccgccaccgcggtggagctccaattcgccctatagtgagtcgtattacgcgcgctcactggccgtngttttacaacntcgtgactgggnaaaaccctggcgttacccaacttaatcnccttgcagcacatccccctttngncagnttggcgtnatancgaagaggcccngcaccgatcgcccttccaaaangttgcncaanctgaanggcgaaatgggaanttgttagcngttaaanattttngtnnaaaattcccngttaaaatttttngttanaannancctcaattttttttaaccaatttgggctaaaaatccggcaaaaantnccttttttaaatnnaanangaatttntacccagaatngggggttnnannggttttcntccg

SEQ ID NO: 654 - DNA, 21 bp, Oreochromis niloticus
tgccctttgtattgtttattt

SEQ ID NO: 655 - DNA, 17 bp, Oreochromis niloticus
cacagcgtgtcaccact

SEQ ID NO: 656 - DNA, 766 bp, Oreochromis niloticus; identical to SEQ ID NO: 323
  misc_feature 2, 3, 4, 5, 7, 12, 24, 660, 723, 726, 752, 753, 760, 766: n = A,T,C or G

SEQ ID NO: 657 - DNA, 21 bp, Oreochromis niloticus
atccccgagcttctattgtgt

SEQ ID NO: 658 - DNA, 16 bp, Oreochromis niloticus
ggcggcaactgtgtga

SEQ ID NO: 659 - DNA, 227 bp, Oreochromis niloticus
tatcgcagacacctatatgcaattactgtaatgaccaggaaatatcaagattgagatttttctctgaaatatttatctcagctttgacgtgcatcagcaagctcagacaattatgtacattaccctgttacattattcctgaagacacacacacacacacacacacacacacacacacacagtctttatctgctgatgaaaaatatgcttgagggcagctactaaat

SEQ ID NO: 660 - DNA, 20 bp, Oreochromis niloticus
tctcagctttgacgtgcatc

SEQ ID NO: 661 - DNA, 20 bp, Oreochromis niloticus
gctgccctcaagcatatttt

SEQ ID NO: 662 - DNA, 315 bp, Oreochromis niloticus; identical to SEQ ID NO: 324

SEQ ID NO: 663 - DNA, 20 bp, Oreochromis niloticus
ttcgccttcttcccttctct

SEQ ID NO: 664 - DNA, 20 bp, Oreochromis niloticus
ttagtgtggctccatcatgc

SEQ ID NO: 665 - DNA, 620 bp, Oreochromis niloticus
  misc_feature 2, 3, 4, 5, 7, 10, 15, 19, 21, 23, 25, 31, 32, 33, 48, 100,488, 503, 530, 590, 594, 620: n = A,T,C or G
tnnnntnttntcttngaanangntnatcttnnngaatacccggccccntttcgaggtcgacggtatcgataagcttgatatcgaattcctgcagcccccngtgttgctcagtcgcaggaatgggggttcctctctatttcaacagcattaaacaaggcaagaaagatctaacagtgcatttatcccagattaaagccattaaggaaaaaaataagtcatcccctgcagtttcactaatttcacatgagtattcctgattgattccacgagccaggctatgcaaacctttgccacccaatgaaaagagcaggagactccagtcagtggaaggagtgtgtgtgtgtgtgtgtgtgtgtgtgtgagagagagaaagaggtcttaaggcgctccactctaaacctgccaagcatccatcaagctcactctggctcctctcagctcacttaacatgtttccccctgcagtattctggggctctgaccttgttncacaacaacacaatnttttctggcgaaaaaatgaaatatatntgtatgaaaatgggaaaaatggttgctctttggggtgcttggctggaaccttaacttttntgtncaaacgactggccattgccttagacn

SEQ ID NO: 666 - DNA, 20 bp, Oreochromis niloticus
ccaatgaaaagagcaggaga

SEQ ID NO: 667 - DNA, 21 bp, Oreochromis niloticus
cttggcaggtttagagtggag

SEQ ID NO: 668 - DNA, 810 bp, Oreochromis niloticus; identical to SEQ ID NO: 325
  misc_feature 3, 9, 18, 20, 32, 35, 619, 658, 704, 706, 723, 740, 747,755, 758, 761, 791, 795, 810: n = A,T,C or G

SEQ ID NO: 669 - DNA, 20 bp, Oreochromis niloticus
accagcagcaatactcaaac

SEQ ID NO: 670 - DNA, 21 bp, Oreochromis niloticus
acagggacacagatagcagat

SEQ ID NO: 671 - DNA, 834 bp, Oreochromis niloticus; identical to SEQ ID NO: 326
  misc_feature 7, 8, 9, 10, 11, 14, 16, 17, 18, 19, 20, 21, 23, 24, 31,45, 46, 47, 68, 79, 84, 85, 86, 453, 467, 470, 473, 479, 489, 505, 513, 514, 517, 518, 519, 520, 521, 522, 525, 528, 530, 532, 544, 545, 546, 547, 555, 556, 557, 558, 559, 560: n = A,T,C or G
  misc_feature 579, 592, 596, 602, 605, 608, 625, 630, 631, 632, 634, 637,656, 672, 675, 676, 678, 679, 681, 687, 689, 692, 695, 696, 700, 701, 708, 710, 712, 717, 718, 719, 728, 729, 730, 731,732, 739, 740, 741, 743, 744, 745, 746, 748, 755, 756: n = A,T,C or G
  misc_feature 757, 758, 759, 765, 766, 768, 769, 770, 771, 772, 773, 788,789, 790, 791, 792, 799, 800, 802, 803, 813, 814, 815, 819, 825, 829, 830, 831: n = A,T,C or G

SEQ ID NO: 672 - DNA, 19 bp, Oreochromis niloticus
agccggtttccagtgagaa

SEQ ID NO: 673 - DNA, 21 bp, Oreochromis niloticus
cgcagctttgattcataccct

SEQ ID NO: 674 - DNA, 719 bp, Oreochromis niloticus
  misc_feature 364, 470, 532, 548, 560, 561, 569, 588, 630, 637, 643, 649,653, 658, 688, 698, 707, 708, 713, 715: n = A,T,C or G
acctgtacggatgggtgtgaatgggtgaatgaggcatgttggataaatcactttgagtgttccagtagagcagataagccctatattagaacccgcccattcaccatattcacaatgaaaatgtatctgtaatatctcatatgactcaccctacagtcctcagacacacagacatatgtcaggttaacaggcagttctgccatgaaagagtgtgtgtgtgtgtgtgtgtgtgtgtgtgtgtgtgagagagagagagagagagagagagacgtgctataatgtatgattgagacatggcactgagaaaaatacaccaaactggagttggcagagcctaagattttcaatatatgcaattttattngcaccaaatcacagcatcagttgcctcaaggtgatttatactgtaaggtaaagatcctacagtaatacagacaaaaccagaacaatcagatgacctcctatcagcnaccacttggtgacagtgggaaggaaaaacactcttttaacacaaagacatggttagacagcntgttctaataattatnagggtgaatacnntaccacantttatctgaattagaaccngaaattagagatatgcagctttggcttttaggccttctgccnttaactnggttanctcctntggnttaantaataaagttggttggctgcaggaattcgntttcagcttnttgttcctnnacctngngggg

SEQ ID NO: 675 - DNA, 21 bp, Oreochromis niloticus
agtagagcagataagccctat

SEQ ID NO: 676 - DNA, 19 bp, Oreochromis niloticus
gccatgtctcaatcataca

SEQ ID NO: 677 - DNA, 473 bp, Oreochromis niloticus
  misc_feature 47, 48: n = A,T,C or G
cccaccaggctgtcaactaacaaagtcaccacaaacaagcacatcanngtcaagggtgcttcaggtgtgtggaagcagaagacaagccccatttctaccagaacacacacacacacacacacacacacacacacacacacacacacacacacacacacacacacacacacacacctatataagaaagacagaggagagggcttacgagagagacagaaagtgttgagtcatgtggcgagcacagagggatcgtgacacatacatggttacatttgtgaagcggaccctttggtttccaggctgtgactgattgtagaggcagaggtgaccataataaacaacaacaggaaagtaaaattgtttaaaaaaaaattcccaaccaaatgtgaagcacatgaccaccacaacatacagtacgccatactatttattaaataattacatttcagatgcttccaccgtggcaccaaaat

SEQ ID NO: 678 - DNA, 20 bp, Oreochromis niloticus
tcaggtgtgtggaagcagaa

SEQ ID NO: 679 - DNA, 20 bp, Oreochromis niloticus
acggtggaggcatctgaaat

SEQ ID NO: 680 - DNA, 815 bp, Oreochromis niloticus
  misc_feature 3, 4, 5, 6, 9, 10, 11, 12, 13, 16, 20, 32, 52, 598, 604,683, 708, 721, 729, 734, 751, 753, 755, 756, 759, 763, 767, 776, 782, 784, 791, 802, 813: n = A,T,C or G
ttnnnnttnnnnnctntgtnaagctccctttnggagtcccccctcgaggttngacggtatcgataagcttgatatcgaattcctgcagcccacatggcacacacactcacacaaatacacaaatcgatagacagacacagatgccaacacacttatacatagatccacaacgcacatatacacccggcttttgattacctcccacctttatttcttcttagcatcctttcccttgtgcccccctccaatccgaccctatccatatcccgttgtttgtcctcctccctccccctctaccttacccctcattgcagaacgcatgtaacacacacacacacacacacacacacacacacacacacaccctaacctgtcaggtaacatcagagaaggggagagttgaagagacgtgacagcatgctgaaggaatcgagtgccaggaacacagacctctctctgttcacctctgctgtgctggaacacaacgagctccagcccctcacctttgttaaggatcagacctgtttggagagtgctggagaacctccaacagtcagagggagtgaagacacgctgaggaaaggagatattagagaanaagttntcgagagggaagttctgataatcaataggcgccggagagttgaagttggaagaagaagaaaacaaaggcaggaaaaaanggaaagaaaggcgttaaataggganggggggggggatnccacttangtttntagaagccgggcgacancngnnggnggancttncaaattcgnccttananggggagnccgttttaccncgcccctcctngg

SEQ ID NO: 681 - DNA, 20 bp, Oreochromis niloticus
acagcgtaggttgaggtaaa

SEQ ID NO: 682 - DNA, 17 bp, Oreochromis niloticus
tcttcgctctggtccaa

SEQ ID NO: 683 - DNA, 564 bp, Oreochromis niloticus
  misc_feature 2, 469, 531, 533, 560: n = A,T,C or G
angccgttgctccccgcggtggcggccgctctagaactagtggatccccccctatgactcgatgccgcacacacatggagcctggaacacctaaaactgtataagatcaacaggaacctaaaagccttcatcaggaactcagtgtggatggcaaacaacagtagaggtcaacttcaagcccatagcacaagtcagcatcaagtgtgggatctaccaagaagaggctctgtccccactgctgttctacagcaatgaataataaataaaagacctcatagtcagtcagatctgaatgattaaactgcagcttcttcacttcagtgtgtgtgtgtgtgtgtgtgtgtgtgtgtgtgttcactccagaaaaatgcagtctgactgctccgactgagtctaagtcagagtaaagttcacatgctgtgttagggtggttactcaaaacgaaaacaaaatattatgcattactggntccttttcttaaaagttatgcagaacattacttagttacctcctgggagtaagtcctctttnangaggataaatctttcctggcacaaaanaaaa

SEQ ID NO: 684 - DNA, 20 bp, Oreochromis niloticus
gtgggatctaccaagaagag

SEQ ID NO: 685 - DNA, 21 bp, Oreochromis niloticus
tttgagtaaccaccctaacac

SEQ ID NO: 686 - DNA, 632 bp, Oreochromis niloticus
  misc_feature 6, 9, 12, 22, 23, 24, 26, 30, 34, 36, 38, 495, 581, 588,631, 632: n = A,T,C or G
gggttnggntanattgtgttcnnnangctngtcncncnggaaacgcccccccctttcgaggtcgacggtatcgataagcttgatatcgaattcctgcagcccaaagggagtttttcctccccactgtcccaccgtatgaagcactcggaggcgactgttgtgatttgtgctgcaaagtaatcgtccaaggtgtcccaatgatgtgtttcagtgtggctgctgaggaagaggagttgcttcatcaatttgaactgtagctcaggatcagcagactcggtcctcaccatggatacaggcagcagccatgacagctgacgctgcagtgtgacagatccgggagagcaggtcaggctggacccactgtgacccctgtgttcacacacacacacacacacacacacacacacacacacacacacatgcagcctgtaacacagtaaccctgaacgtgccttactgggggggatccactagttctagagcggccgccaccgnggtggagctccaattcgccctatagtgagtcgtattacgcgcgctcactggccgtagttttacaacagtcgtgactgggaaaaccntggcgtnaccccaacttaatcgccttgcagcacattccccttttggcagnn

SEQ ID NO: 687 - DNA, 16 bp, Oreochromis niloticus
cgggagagcaggtcag

SEQ ID NO: 688 - DNA, 21 bp, Oreochromis niloticus
cacgttcagggttactgtgtt

SEQ ID NO: 689 - DNA, 625 bp, Oreochromis niloticus
  misc_feature 2, 3, 4, 5, 7, 8, 19, 33, 527, 530, 532, 534, 540, 544,552, 556, 583, 625: n = A,T,C or G
tnnnntnnttggtttgacnaccttgggtaccgngccccccctcgaggtcgacggtatcgataagcttgatatcgaattcctgcagcccacctctgctcttctttggtttgatgactatttgtccataagtgacgtcagttctcactgctgagtcgactgcagctggatcagtctctgcacagtaaaacacacacacacacacacacacacacacacacacacacacacacacacacacacaggtgtagaaactactttgtatgaacgacttcccatcaggatgcactcagagggttagagtatcccctcagatgtctacagctctgtgctgagccccctgctccatactttctactcatacgactgcagccagctacacattcataaaatctgaatgggcagagtttcaggctgagagcagccaacaacaggaagtttctgctgtggttttactcaattctgtttgcagaaattaaaataaaaggttttggggggatccacttagttctagagcggccgccaccggnggngnanctccanttcncctatagngagntccgtattacgcgcgctcctggcccgntcgtttacaaacgttcgtgactgggaaaaccctggggcgttn

SEQ ID NO: 690 - DNA, 19 bp, Oreochromis niloticus
gcagctggatcagtctctg

SEQ ID NO: 691 - DNA, 21 bp, Oreochromis niloticus
tgggaagtcgttcatacaaag

SEQ ID NO: 692 - DNA, 619 bp, Oreochromis niloticus; identical to SEQ ID NO: 327
  misc_feature 7, 9, 13, 20, 586, 619: n = A,T,C or G

SEQ ID NO: 693 - DNA, 21 bp, Oreochromis niloticus
cggcggcgacttgtagtgtaa

SEQ ID NO: 694 - DNA, 18 bp, Oreochromis niloticus
ggacggtctggcgaggac

SEQ ID NO: 695 - DNA, 794 bp, Oreochromis niloticus; identical to SEQ ID NO: 328
  misc_feature 3, 9, 13, 25, 34, 631, 642, 646, 675, 681, 683, 688, 712,733, 763, 782, 786, 790, 792: n = A,T,C or G

SEQ ID NO: 696 - DNA, 18 bp, Oreochromis niloticus
cgctgttctgtccaggtc

SEQ ID NO: 697 - DNA, 21 bp, Oreochromis niloticus
gccgaagtagttgttcatcac

SEQ ID NO: 698 - DNA, 691 bp, Oreochromis niloticus
  misc_feature 5, 24, 274, 309, 328, 359, 367, 377, 379, 395, 418, 445,446, 447, 450, 454, 458, 460, 465, 466, 467, 473, 482, 491, 505, 506, 511, 512, 513, 517, 522, 523, 524, 529, 533, 536,537, 538, 549, 557, 562, 563, 564, 566, 570, 573, 576: n = A,T,C or G
  misc_feature 583, 592, 594, 596, 597, 600, 601, 605, 608, 609, 615, 617,618, 622, 628, 639, 643, 644, 653, 655, 657, 660, 665, 676, 680, 681, 688: n = A,T,C or G
ttgantccttgcattaccgcggcngttgccgttctagacctagtggatcccccactcgttgattagagcaagctgacctgaagttgtttacatatattcaataacaaagcaaactaaaaccctttttattctgacaggcacacctaataactgtgtgtgtgtgtgtgtgtgtgtgtgtgtgtgtgtgtgtgtgtgtgtgtgtagggatgttaaactttgattttatttatctgtgaagctttattgtgtaaccctacatatgtctttatatttntatcacctatgttgagcacacggagtttatgtgtnatgaaatgtggtatataantaaaattgccaatgtcaatgtggtatcgtantgatctgntaaaatcagntnctgcttgagaaaatgnttcacaacacactgttacctggnaacaactgcttctgtaaaaatgaccgnnngcnaccngttntnctttnnncctcanagaattccnatttctaanctttatccataccnntcctnnnttcnaaggnnnggggncccnggnnncccaaacttcnttgttccnctttnnncntaanggnttnaaacttncctatctcntntnnccnntaanttnnatatcncnnttanccttgnttttccttggnggannaaaaaattntntnatntcccnttttccataantctnncctcctnccg

SEQ ID NO: 699 - DNA, 19 bp, Oreochromis niloticus
ttttattctgacaggcaca

SEQ ID NO: 700 - DNA, 21 bp, Oreochromis niloticus
aaaatcaaagtttaacatccc

SEQ ID NO: 701 - DNA, 340 bp, Oreochromis niloticus; identical to SEQ ID NO: 329

SEQ ID NO: 702 - DNA, 20 bp, Oreochromis niloticus
tgaaagacaggaggtgtgga

SEQ ID NO: 703 - DNA, 20 bp, Oreochromis niloticus
cgcccacacctgagtatgat

SEQ ID NO: 704 - DNA, 421 bp, Oreochromis niloticus
  misc_feature 355: n = A,T,C or G
ctcagtgctaaagatattgtaaaatgtgtgagtgtgagtgcactctggtctctggtggacaaatgatgtgataaaaaaaccacacacacacacacacacacacacacacagagtgtagctgtagtgacagtaaatgttgttaaatacagtgctgtaataaacttcacttcacacttagagtttcctcattctgtgttattccctctgtttcaggcatggacagcagactagtcctcactctcctgtttgtgatgctgactgggtgtttcatgggcacttatgctcaaaataatacaaccagtgtgactccagcaaccagcacaaacactaccagcagcaacaccaacaccacctncaacaccaacaccacagcaccatccagcaacaccagcacatcagcaacaaccagtacgaactcatt

SEQ ID NO: 705 - DNA, 20 bp, Oreochromis niloticus
gtgcactctggtctctggtg

SEQ ID NO: 706 - DNA, 20 bp, Oreochromis niloticus
ctgtccatgcctgaaacaga

SEQ ID NO: 707 - DNA, 636 bp, Oreochromis niloticus
  misc_feature 5, 25, 40, 45, 249, 342, 347, 400, 424, 425, 473, 483, 493,500, 509, 510, 519, 537, 540, 544, 554, 556, 558, 561, 571, 573, 574, 581, 585, 594, 597, 598, 602, 613, 616, 617, 620,623, 624, 627, 628, 629, 630, 634: n = A,T,C or G
ttgantccattgcatttccgcggcngttgccgttctaganctagnggatcccccacaccgcatgggtaatactgtatgcattacatgcatgagcagctaagtgtgcccctcggtgagttttctgttgctctgactcatatttattctgaaagcagaacacaagtgattcctccccaacagtaaaatgtatatatacaatgtgtgtgtgtgtgtgtgtgtgtgtgtgtgtgtgtgtgtgtgtgtgtgtgnggaccagagtgctcatcaaaatcctgtcatggctctagagcgtgtgtttttacccacagcaggggagttatttgagtgtgtgactgcatgtangtggncagacctttcgggtgtttttgatgttttatactggggggctgcaggaatttcnatatcaagcttatcgataccgtcnnccttgagggggggcccggcacccagcttttgttccctttagtgagggnttaattgccncttggcgttntcatggncatagctgnntccctgtgngaaattgttatccgctcncantttncacacatatncnanccnggaagcatanannggtaaancctnggggtgccnaanngagntgaactaactnacnnttntcnngcnnnncccncc

SEQ ID NO: 708 - DNA, 21 bp, Oreochromis niloticus
gtgattcctccccaacagtaa

SEQ ID NO: 709 - DNA, 19 bp, Oreochromis niloticus
agccatgacaggattttga

SEQ ID NO: 710 - DNA, 780 bp, Oreochromis niloticus; identical to SEQ ID NO: 368
  misc_feature 3, 4, 15, 18, 44, 45, 519, 573, 631, 636, 664, 667, 670,685, 689, 692, 704, 710, 713, 715, 730, 736, 749, 752, 762, 763: n = A,T,C or G

SEQ ID NO: 711 - DNA, 21 bp, Oreochromis niloticus
gtctcagtttgtttggcttac

SEQ ID NO: 712 - DNA, 20 bp, Oreochromis niloticus
aggtgattggcttagatgat

SEQ ID NO: 713 - DNA, 637 bp, Oreochromis niloticus
  misc_feature 22, 577, 598, 611: n = A,T,C or G
gcctttgctccccgcggtggcngccgctctagaactagtggatcccccacatactgatagccgtgggagctgttatgatgcttgtgggcttccttggatggtatggtgccattcaggaatctcagtgccttctgggcacagtgagtataccgttttatccacaagtgacactttttttcaaataaagtattttaatctttggagtcactgaagttaaaataaatatctttgatttctagttcttcttctttttggtgatcctgtttgcctgtgaagtggctgcagcaatctggggtttcatgaacagggacactgtaagcgcacgcacacacgcacacacagacacacacacacacacacacactgtcacggctcacagcttgtttgatgtctgcattgatgttccttctctgctcctgtagtgaatcatctctgtttgttgctgtgtcttttgggctgcaggaattcgatatcaagcttatcgatacccgtcgacctcgagggggggccccggtacccagctttttgttccctttagtggaaggggttaaattgcgcctttgggcgtaatcatggncattagctgtttccctggggngaaaattggtatncgcttacaatttcccacaacatacga

SEQ ID NO: 714 - DNA, 21 bp, Oreochromis niloticus
accgttttatccacaagtgac

SEQ ID NO: 715 - DNA, 19 bp, Oreochromis niloticus
caggagcagagaaggaaca

SEQ ID NO: 716 - DNA, 155 bp, Oreochromis niloticus
  misc_feature 8, 43: n = A,T,C or G
ctgacaanacaatgagctctgcttctccagtgtgagcgcgacnaaccttggacaactaacacacacacacactcacacacacacacacacacacacacacacacacacacacacgcagacactccacgctgactgtcttggcaaaagagttatgt

SEQ ID NO: 717 - DNA, 20 bp, Oreochromis niloticus
tgagctctgcttctccagtg

SEQ ID NO: 718 - DNA, 20 bp, Oreochromis niloticus
cagtcagcgtggagtgtctg

SEQ ID NO: 719 - DNA, 594 bp, Oreochromis niloticus
  misc_feature 2, 4, 6, 9, 19, 30, 31, 34, 35, 52, 76, 99, 100, 128, 528,547, 573, 590, 594: n = A,T,C or G
gngntnatnttatttgttntagtaatctannttnngctccgccctttgttanatcgaccgtctcgataagcttganatcgaattcctgcagcccattcnnagaaatttctcgtatttcatgcgggggncaaaccacacctgattaaatcctactggcaaagacacacacatacacacacacacacacacacacacacacacacacacacacacacacacacacacacacacacacacacactactacactgagtaaaatgggtaagatctgttgtgacggtcagaggaatgtaaggagagctgaggtgaagtggtgctgctgcaccagagaggttgtcatggagaacgaaacccaaaaagagacgtggtgatcgataatgcttccttattctcacaagaggtcatacaggttacagaggagtgggggatccactagttctagagcggccgccaccgcggtggagctccaattcgccctatagtgagtcgtattacgcgcgctcactggcccgtcgttttacaaacgtngtgactgggaaaacccttngcgttacccaacttaatcgccttggnaacacattccccttttngcan

SEQ ID NO: 720 - DNA, 21 bp, Oreochromis niloticus
aatttctcgtatttcatgcta

SEQ ID NO: 721 - DNA, 19 bp, Oreochromis niloticus
tccttacattcctctgacc

SEQ ID NO: 722 - DNA, 605 bp, Oreochromis niloticus
  misc_feature 8, 9, 13, 33, 38, 43, 456, 469, 478, 502, 512, 515, 529,530, 549, 554, 587, 593, 605: n = A,T,C or G
tcttgttnnatcncttggacacccgcccctttngaggncgacngtatcgataagcttgatatcgaattcctgcagcccagagggagggagggacgaggtcagtggggttcatttccatccggcaaacctcaaacagacacatgcacacacacacacacacacacacacacacacacacacacacacacaaacaagaacttgtatggagcagagttttccagcaggagctcaatttgtgtttgggctcacttacactattatattggtccagtatgatctcagctcagactgagtctaaatgtctctgtctgcctatttgtaggtgggattgtgtgtatgtgtgtgtctgtgtgcaagcgaaatgtgggggatccactagttctagagcggccgccaccgcggtggagctccaattcgccctatagtgagtcgtattacgcgcgctcactggccgtngttttacaacgtngtgactggnaaaaccctggcgttacccaacttnatcgccttgnagnacattccccttttnngcagcttggcgttaatagncgaanaggccccggaccgaatcggccctttccaaacantttgcncaagccttgaan

SEQ ID NO: 723 - DNA, 18 bp, Oreochromis niloticus
gtcagtggggttcatttc

SEQ ID NO: 724 - DNA, 21 bp, Oreochromis niloticus
aggcagacagagacatttaga

SEQ ID NO: 725 - DNA, 488 bp, Oreochromis niloticus
  misc_feature 18, 93, 262, 378, 411, 447: n = A,T,C or G
atatgtaccttgctttcnaatacgctctctagataaagcctgaccttcagttttctctgcagtgtgtgtgtgtgtgtgtgtgtgtgtgtgtgngcgtgcgtgcgtgtgtgtgtgtgcagttgttcttcccttttgctcttatgaagctgttatgcagagaaaactcttgtcatgtaaatctcatctttagctgtctgtcctttcctttgggtggctagctgttcgggtagatatagtatttgctcttattgcttgaagctgnggggacggaggttttctatatgaagaatgattttaaataaattcattattcagctcagtaaagttttattaaacccttggggcatgttggagggcgtcgcgtgaactgaagggcanacccacatatctcaaccatgtatacttattaanaaattgatgtgccttgctgcttaaactgctgtgcangcaggtgccaaaatgtaaccgatcactttaatgttttatga

SEQ ID NO: 726 - DNA, 20 bp, Oreochromis niloticus
gcctgaccttcagttttctc

SEQ ID NO: 727 - DNA, 20 bp, Oreochromis niloticus
gaacagctagccacccaaag

SEQ ID NO: 728 - DNA, 782 bp, Oreochromis niloticus
  misc_feature 7, 20, 24, 32, 486, 510, 512, 531, 555, 611, 661, 694, 713,725, 728, 730, 741, 748, 752, 755, 756, 762, 770, 781: n = A,T,C or G
tttgaantccctttgaacgnggcngcggccgntctagaactagtggatccccccccatttaagatcagtgtccttaataaccacacccaagacctcacacccaatgagatgatgaggggaggtcacagatcacatcagattagtgcagcttgttttgctttggcggttgaagcccccatgcctcacatgcgcaaacacacacacacacacacacacacacacacacacacacacacacacacacacacacacacacacacacacacacgtgcacagacactaccagcttgtcactgctgccctcttaatgtgaaagcaagtatattttgacagataacaaatgagtggcaggagaacacagtgggctgcaggaattcgatatcaagcttatcgataccgtcgacctcgagggggggcccggtcccagcttttgttccctttagtgaggggtaattgcgcgcttggcgtaatcatggtcatagctgnttcctgtgggaaattggtatccgntnacaattcacacaacatacnagccggaagcataaagtgtaaagnctggggtgcctaatgagtgagctaactcacattaattgcgttgcgctactggccgntttccagtcgggaaactgtcgtgccagctgcattaatgaatcgggcaacncgcggtgagaggccgtttgcgtattgggcgctntttcgctttcttcggttantggcttgattgnctngnaagttcgggtncgggagnggtntannttactnaaaggcgnaatcggttttnt

SEQ ID NO: 729 - DNA, 19 bp, Oreochromis niloticus
atgagatgatgaggggagg

SEQ ID NO: 730 - DNA, 21 bp, Oreochromis niloticus
gcagtgacaagctggtagtgt

SEQ ID NO: 731 - DNA, 598 bp, Oreochromis niloticus
  misc_feature 5, 6, 8, 19, 34, 37, 85, 113, 570, 587, 597, 598: n = A,T,C or G
ttganntntgaagcctttngaataccccttcccnttntggaggtcgacggtatcgataagcttgatatcgaattcctgcagcccnttcacacacacatacagagacagtgtgntagcggaagtccaaagtgaccaaagtgttcagggagagacggtgatgaagcacacacagctaagctgctacagttatagttggatgctctgaccacatactgactagatagactgaccacagttcaccacatcactgctaaaaagaaagactatgaggtcaggtgataatcactacgaacagttacacacacttcatcacttcatccacacacgcgcgcacacacacacacacacacacacacacacaggttggcattaccttaagtttagctgtgttaggctgtgggggatccactagttctagagcggccgccaccgcggtggagctccaattcgccctatagtgagtcgtattacgcgcgctcactggccgtcgttttacaacgtcgtgactgggaaaacccttggcgttacccaacttaatcgccttgcagcacatccccctttcgccagctnggcgtaatagcgaagangccccacccnn

SEQ ID NO: 732 - DNA, 17 bp, Oreochromis niloticus
cggtgatgaagcacaac

SEQ ID NO: 733 - DNA, 21 bp, Oreochromis niloticus
agctaaacttaaggtaatgcc

SEQ ID NO: 734 - DNA, 256 bp, Oreochromis niloticus
acgctcgcaccaggaagcaactcaatggctccttttgatgctctttaatgatatacagtatttcattaccactctcaccacacacacacacacacacacacacacacacacacacacacacacacacacacacacacacacacacaactattataagaaagaccatcacaaatggtatacacatccatgtaacgtcaataaaaaacacattttgttatttatagccacagccgtttcacacacaagcacatagtgt

SEQ ID NO: 735 - DNA, 18 bp, Oreochromis niloticus
gcaccaggaagcaactca

SEQ ID NO: 736 - DNA, 21 bp, Oreochromis niloticus
cggctgtggctataaataaca

SEQ ID NO: 737 - DNA, 610 bp, Oreochromis niloticus
  misc_feature 2, 3, 5, 18, 20, 29, 34, 40, 42, 610: n = A,T,C or G
tnntnttttggacaactnanctcttgganacccngccccntntcgaggtcgacggtatcgataagcttgatatcgaattcctgcagcccacctcttaagttgcactagctcagggttcttctctgccacagagatgacattccattgttctgtccactgagacaaagttaaaattaccggtaataattagtgtaaatgctgattaagcagtcacagtattgagatccaaatcacaaacacacaggcacacacgtgcacacatgcgaacacacacacacacacacacacacacacacacacacatacacatacacatacacacacatacagcagattttctgcaaatattctggttcttcattggagattcttgagattagaaatgtaaaatacataatttaactcttcaagttatttaaagaggctttctttttccccacagctttcagtttgatctcttgcgttttagacatgaaggcgcccgttgtcaccctgttgcaactgtttaggttcctcccggctttcacacacgccctctctctttggttggtctgaactgtgcccctgtgggctgcattggcagaaaggagttttctgggggcatttgctn

SEQ ID NO: 738 - DNA, 21 bp, Oreochromis niloticus
tctgccacagagatgacattc

SEQ ID NO: 739 - DNA, 20 bp, Oreochromis niloticus
agctgtggggaaaaagaaag

SEQ ID NO: 740 - DNA, 434 bp, Oreochromis niloticus
  misc_feature 434: n = A,T,C or G
aaattaactctcccaattctgccaagcagagtggtcaaatatcagactcagttttattgtcattcaacaatttgacatgatatgaatgaaacacagttacttaggtcttggcattgcatcatgctaccaaacaacaagtgaaacagtaggaagaataaataattaccaaaagaaagtaagaaaatatgcaggtgtaataggtgcaacttgataagcaaatatcaaatatcaaaaaaagttgctcacacacacacacacacacacacacacacacacacacacacacacacacacacacacacacacacacacacggctcacaaaatttcaaaatccctggtagccctttgggcaggcacgcttcagtttttggtagcccgaattaaaaagagaacaatttttttactgatgtcttgtttcctttacaatattgn

SEQ ID NO: 741 - DNA, 21 bp, Oreochromis niloticus
gttacttaggtcttggcattg

SEQ ID NO: 742 - DNA, 18 bp, Oreochromis niloticus
gctaccagggattttgaa

SEQ ID NO: 743 - DNA, 558 bp, Oreochromis niloticus
  misc_feature 475, 503, 540: n = A,T,C or G
tttttgggcagcaacaggacgtgaacagacgtatatcagtcaactggaggctaccagtccaaagctgtggaacaataaacataacagagcgaatgcactcacacacacacacacacacacacacacacacacacacacacacagaaggggagacaatgttgttttccatggaaacatctctttgctgttgcaaggactgctgcatactttatgtcacacatgacacagaccctgaccactcttacagtgttagtaaacatacagaaataccatatttgtgcttcatgttgtctctgctttacacctgtaaccacatgcacatggtgcattaattgtgctacactaaagatgcaaatttgacctttttccaccaacgctgcaccactgctggtcccgtgtggaaaaggtattgaatgaaggcagagggggaaattataattctggcagagccctcttctgcttatagcatctctgncattcattcctcctcattcttccttctncagcttaaatgcctttcttcttctgctatggcttttncaacacccacccaacact

SEQ ID NO: 744 - DNA, 23 bp, Oreochromis niloticus
taaacataacagagcgaatgcta

SEQ ID NO: 745 - DNA, 18 bp, Oreochromis niloticus
cgttggtggaaaaaggtc

SEQ ID NO: 746 - DNA, 523 bp, Oreochromis niloticus; identical to SEQ ID NO: 330
  misc_feature 400, 418, 419, 511, 523: n = A,T,C or G

SEQ ID NO: 747 - DNA, 20 bp, Oreochromis niloticus
ccccttgtttgtgtttttga

SEQ ID NO: 748 - DNA, 21 bp, Oreochromis niloticus
ccagatgaacctttgcctaat

SEQ ID NO: 749 - DNA, 568 bp, Oreochromis niloticus
  misc_feature 1, 2, 475: n = A,T,C or G
nntttgaagcctttgctccccgcggtggcggccgctctagaactagtggatcccccacaacagctggtaacagacacagaacagaactgagctgtcacatctacactgcagagctgacacacacacacacacacacacgatagtgctgaaactttaatacaaacacatacacacacatgctgacatacatataccagcaactgcactaattctctctctctcacgcacacacacacacacacaccagtatacatatgagcaatccagtcttgatctatgagctgtggaaaagccagctgatatttttcatgtgtgttccctttatcagagctcagttctgcaggtcttctctctgattcttatctgtggcagatgaagcaagaacttcctggatcccacagggggctgcaggaattcgatatcaagcttatcgataccgtcgacctcgagggggggcccggtacccagcttttgntccctttagtgagggttaattgcgcgcttggcgtaatcatggtcatagctgtttcctgtgtgaaattggtatccgctcacaattccacacaat

SEQ ID NO: 750 - DNA, 21 bp, Oreochromis niloticus
accagcaactgcactaattct

SEQ ID NO: 751 - DNA, 17 bp, Oreochromis niloticus
cagctggcttttccaca

SEQ ID NO: 752 - DNA, 593 bp, Oreochromis niloticus
  misc_feature 2, 4, 6, 7, 14, 26, 38, 532, 573, 592: n = A,T,C or G
tntntnnttgattngaatccttgganctccccgcggtngcggccgctctagaactagtggatcccccccctcactgcttcccccaagccatcagactcctgaacactcggtgactggactgacacacacacacacacacacacacacacacacacacacacacacacacacacacacacacaccttcatacatcaagtaactttttgcacaatgctcagtcttttgcacaacccaccgtcattgttgcacttttctattgcactgttgtgtcttgtgtctgtatcgttctgttctgtggtgtctttgtttcgtttttttgcaatttttgcacacttgcactttatgtagtcctgtgatgattgtctgttatatgtcataagtagcaccatggtcttggagcaacgttgtctcgattcactgtgtgctgtgggctgcaggaattcgatatcaagcttatcgataccgtcgacctcgagggggggcccggtacccagcttttgttccctttagtgagggttaattgcgcgcttnggcgtaatcatggtcatagctggtttcctgtgtgaaattgntatcccgctcacaattccnt

SEQ ID NO: 753 - DNA, 17 bp, Oreochromis niloticus
ccccaagccatcagact

SEQ ID NO: 754 - DNA, 21 bp, Oreochromis niloticus
aaaacgaaacaaagacaccac

SEQ ID NO: 755 - DNA, 600 bp, Oreochromis niloticus
  misc_feature 10, 12, 484, 555, 557, 586, 600: n = A,T,C or G
ttgttgaccncntggagctccccgcggtggcggccgctctagaactagtggatcccccaaatgacaaaagacaggatcagtcattctcacacacacacacacacacacacacacacacacacaaacctgtaattgccactaatattaacactcggctcaattttaattgtattagaagagacagcatgtgcatggagctgtttgcttctcgtttccatgttaatgagctgatggctgcaattaaactgtgatcctgttagacttcgattccaagggaggagacaggaggaggggaaagtgagggaggaggaggtgattaagagaggaatgaagaggggaaataaagaggaaagaaaagggggctgcaggaattcgatatcaagcttatcgataccgtcgacctcgagggggggcccggtacccagcttttgttccctttagtgagggttaattgcgcgcttggcgtaatcatggtcatagctgnttcctgtgtgaaattgttatccgctcacaattccacacaacatacgagccggaagcataaaagtgtaaacntngggtgctaatgagtgagctactccattanttgcgttcgctccn

SEQ ID NO: 756 - DNA, 21 bp, Oreochromis niloticus
atgacaaaagacaggatcagt

SEQ ID NO: 757 - DNA, 18 bp, Oreochromis niloticus
tcccctcttcattcctct

SEQ ID NO: 758 - DNA, 527 bp, Oreochromis niloticus
  misc_feature 17, 20, 28, 35, 72, 92, 95, 98, 116, 290, 423, 449, 452,469, 479, 482, 496, 518: n = A,T,C or G
ttgttccttccttgccnccntttgttgnggacctnctagaactagtggatccccccagatgacatatttttnagctgccaatcactcatatnggnggnacagaaactccagtgcangggcacaaacacacaatctctcaatcatatctttgcatgcaaactttcagtcactgtcttaatctttggctggcacacacacagacacacacacacacacacacacacgcacgtacataaccaaaaaaaataaatgcaaagtcgatactgtcaagtaaaaaattgcagtgcagngcagcattcaacaggtgactcaacagaaggtggtcaaaatcttaaaaccaaacatgcagtcatcacagataaaatgaaaataactatacagaacagactttcttccattttactgtgggctgcaggaatttcnatatcaagcttattgataccgtcganctntagggggggccccggtncccagttttntgntcccttttagtganggttaattgcgcgctttggcgntattcattg

SEQ ID NO: 759 - DNA, 21 bp, Oreochromis niloticus
tgcaaactttcagtcactgtc

SEQ ID NO: 760 - DNA, 21 bp, Oreochromis niloticus
gattttgaccaccttctgttg

SEQ ID NO: 761 - DNA, 351 bp, Oreochromis niloticus
agccgatgccacatctgtttgtcatgttagcacttaagcgcctgcaggagccatgatgctaagtggagacagagtcctctctcccactctctccatccaccctttctcctaattacatttgttcattaatccattttctgcccacttctctttcttgtttatgttcttgcatcagtgggcttttgcctcctccgaccagcagacagtgacctttaaggagatgccagaagactctgtaagacaatgttaccccttcaccctctcgctaaatgcacacatacacacacacacacacacacacacacacacacacacacacacacacacacacccttacccagtcccatcctt

SEQ ID NO: 762 - DNA, 19 bp, Oreochromis niloticus
ccgaccagcagacagtgac

SEQ ID NO: 763 - DNA, 20 bp, Oreochromis niloticus
aaggatgggactgggtaagg

SEQ ID NO: 764 - DNA, 483 bp, Oreochromis niloticus
  misc_feature 35: n = A,T,C or G
ggcatagaaaatgtggacagacagagtgttgtttntccacggagctggagaagtgtaacaatcataaagagtgtgcagttcataaaagcacagtgcagagaatcgcctttcatagagtttggtagacaaaaaaatatgtgaacgaataaaaatattagtgtaatacaacttaagagacaccttagttagtggttggatgcctatgatgtgtatacattatatatactttaacaccatccctcaccaccaccaccaccacacacacacacacacacacaacaaaataaaataaaaaaacagaaaaagatatttttaactagctaacagccttagagtatccccaagctgaacacagaggctacttcgtcctgtatgtgttttcctggaaccaaaataataaaaaaggaggaagtgattcatgctgaataagacaaatggcaaagcagctactgtgcatcactatttcactggtcagttcctgct

SEQ ID NO: 765 - DNA, 20 bp, Oreochromis niloticus
ggttggatgcctatgatgtg

SEQ ID NO: 766 - DNA, 20 bp, Oreochromis niloticus
agcctctgtgttcagcttgg

SEQ ID NO: 767 - DNA, 360 bp, Oreochromis niloticus
acttggacaacaatgggatgaaatgctggtgttgtttaaagtttacagagcattgtgtgtgtgtgtgtgtgtgtgtgtgtgtgtgtgtgtacagtggtttggctggaggagagagaagaagcagggggtgtaaagaagtgagtcaggaaatggtgaaatgtgaggagatggaagacttgaggggggacagaaaaagaaagaggagcgcatactgtaaacagaaacgtgtcagggctgatcttcatcagcagatcccactctgactgaggacttcaggtgattgtctcagaggaaacccttcatgcagtctgattgaggagttgcataattaggcttgagggtttctttaaagatgaatta

SEQ ID NO: 768 - DNA, 20 bp, Oreochromis niloticus
ttggacaacaatgggatgaa

SEQ ID NO: 769 - DNA, 20 bp, Oreochromis niloticus
aagatcagccctgacacgtt

SEQ ID NO: 770 - DNA, 654 bp, Oreochromis niloticus
  misc_feature 3, 16, 26, 457, 469, 522, 526, 529, 542, 546, 561, 577,587, 592, 593, 596, 602, 630, 638, 642, 651, 653: n = A,T,C or G
ttngtttgacaaccgntgggtaccgngccccccctcgaggtcgacggtatcgataagcttgatatcgaattcctgcagcccactcaatgaattaaatctgagctactttcaatgtatcattgaatctgaataatctttattatcactatacacacagagcaatgcaacatcacaaaaccggtttcttggagttttccttttttttaacttctttctcgtaacagtgtgtatatgtgtgtgtgtgtgtgtgtgtgtgtgtgtgtgtgtgtgtgtgcgtgtgtgcgtgtgcatttacacggaaatgtctggaaaggtcatagcatccagtgaaaattctaggggaacgaggcagcacagaggttacactgtcacctcacagcatgaagttcctgattcaaaacccagctgggaactttccatgttcttcctgtgggggatccactagttctagagcggncgccaccgcggnggagctccaattcgccctatagtgagtcgtattacgcgcgctcactggcccgngcgnttnaacaaccttcgtngacntggggaaaaaccccngggcgggttccccccnaccttaaaanccccnnttngcagcnaaaattccccccttttttccccccagtnttggcgtntatnaaccaaaanang

SEQ ID NO: 771 - DNA, 19 bp, Oreochromis niloticus
ccggtttcttggagttttc

SEQ ID NO: 772 - DNA, 21 bp, Oreochromis niloticus
cccctagaattttcactggat

SEQ ID NO: 773 - DNA, 673 bp, Oreochromis niloticus
  misc_feature 7, 29, 30, 83, 86, 182, 200, 373, 374, 423, 478, 502, 539,547, 585, 594, 596, 605, 634, 637, 654, 666: n = A,T,C or G
tttaaancccttggaccgtccccaccctnnaggtcgacggtatcgataagcttgatatcgaattcctgcagcccactgatgtnttntttttctatactgttgattaactatggtgaccctttgaggttggggacacctggaataacttgaattattccttatcattgataatgcttcaagtncacgggttactgaagagngggaaatctaacagcatacatcaggtgaaagtcacacaaccttgagtcaaaaaaacattcactgcttgaaaagttaaagagtctgtttcacagtaggaccatggacaggacaaaagcactacacatcactgcacacgcacacacacacacacacacacacacacacggagcanngtaaaaggaaactaactacatgtgggggatccactagttctagagcggncgccaccgcggtggagctccaattcgccctatagtgagtcgtattacgcgcgctnactggccgtcgttttacaacgtcntgactgggaaaaccctggcgttacccaacttaatcgncttgcagnacatccccctttcgccagcttgggcgtaatagccgaanaggccccgnancgattcggnctttccaaacagttgcgccacctggatgnccnatgggaattgtaagccntaatatttttgntaaattc

SEQ ID NO: 774 - DNA, 21 bp, Oreochromis niloticus
agtttccttttacactgctcc

SEQ ID NO: 775 - DNA, 21 bp, Oreochromis niloticus
cagcatacatcaggtgaaagt

SEQ ID NO: 776 - DNA, 602 bp, Oreochromis niloticus
  misc_feature 3, 4, 6, 7, 9, 11, 12, 17, 21, 26, 29, 32, 35, 36, 39, 56,62, 583, 593, 595, 596, 602: n = A,T,C or G
ggnngnngnannttatntctnctagnaanttnagnnatnctccccccttttgaggncgaccntatcgataagcttgatatcgaattcctgcagcccacattaacagaacaggacacacaagggtgcaggatcttttcatctccacattatcagtgagattactaatgagagcagttgtatgtgcttataacaccatcactttcagcctattgagccttgtgagcacacagccagttctctgcaactgtgggagttatcaaagtgtgtgtgtgtgtgtgtgtgtgtgtgtgtaattagtgttgaggaagagggatagtggggttaaactaaacactatggagaaccatgacatctgggagaaaggatgagggaaggcttttctctctgcacagtcatgcacagaaacagagacttggctcttattctttgcccctttctttcccatttcatcacctttttagagctatagtgcacagagggtggagaggacccctctgctgggacaaaaggcatctcatcttaaggatgaggggggtggaatgaatatgcattggaaatgggggggaattgaaatggaaatacngggaagtaantnnccatgn

SEQ ID NO: 777 - DNA, 20 bp, Oreochromis niloticus
gcctattgagccttgtgaga

SEQ ID NO: 778 - DNA, 21 bp, Oreochromis niloticus
gtttaaccccactatcccttc

SEQ ID NO: 779 - DNA, 634 bp, Oreochromis niloticus
  misc_feature 4, 6, 10, 11, 22, 23, 31, 54: n = A,T,C or G
ttgntntccnntgtgatcttcnntggaaacncccgccccctttcgaggtcgacngtatcgataagcttgatatcgaattcctgcagccccctctgggaagtttctccgcattcctgcaatagattcagacatacacacctaaaaattaatagacaggaagctggaaggaacctgaagctgaggctgggtaagtgtgtgcaggctgagagtgtgctgctctttttcacaacagctcatcagttgttgccttcatgtccactgttgtgtgtgtgtgtgtgtgtgtgctgaaacaggagtttggaggggctactgctgtaggactggagaccagaacctcatcatccccgccctgccaggtgctgtattttcctgactcatcctctgtttcatcgctgaatgcttctctgtcactttccccgcctgcacaaacataactcagtcacaggaagtgctctaccgctttcagttacgtcctcactaaagcgtatctcttggtcattgtgtcttcaagtgcagatacagtgaaaacagaggaagctatttttctttaagtgttgttagagctgaaataaccacagcttccacccaagaaaatgcagcatttgtagggaaggttcgtattttaaagtgttca

SEQ ID NO: 780 - DNA, 21 bp, Oreochromis niloticus
ctcatcagttgttgccttcat

SEQ ID NO: 781 - DNA, 19 bp, Oreochromis niloticus
cggtagagcacttcctgtg

SEQ ID NO: 782 - DNA, 660 bp, Oreochromis niloticus
  misc_feature 30, 564, 596, 612, 617, 627, 640, 642, 643, 644, 645: n = A,T,C or G
tttgaaacccttggaccggcccccccctcnaggtcgacggtatcgataagcttgatatcgaattcctgcagcccacacacaacaagggattttctgaggtttgaattcaattgtaaacagtaaaacaagcttcacaggatcataaggagcaacataacagaaggagcaggtgtgcataaaacacaaaggatcactctcaccatgttcccactgtggaggcttgctttcttaatgatataataatatatcattaagaatgcatatatatatatatacatatatatgtgtgtgtgtgtgtgtgtgtgtgtgtgtgtgtgtgtagagagagagagagagagatgcatttaatacatatcttaatataggaaaaggaagtgaaatttcaagagcacatctgagtttttccacatgataaagaaatctttcagcgtgacttgggcttaaagtctaagaaataaatgtgtaaaattacagaaaaaattctggtagctcattgtctcatggtcctgtaattttctgttaatttagaaaatgggggggatccactagttctagagcggccgncaccgcggtggagctcaattcgcccctatagngagtccgtattacgcncgctnactggcccgncgttttacaaccntnnnngactgggaaaacccc

SEQ ID NO: 783 - DNA, 21 bp, Oreochromis niloticus
gcaacataacagaaggagcag

SEQ ID NO: 784 - DNA, 18 bp, Oreochromis niloticus
cccaagtcacgctgaaag

SEQ ID NO: 785 - DNA, 232 bp, Oreochromis niloticus
  misc_feature 85: n = A,T,C or G
cctcctacaatcctaatccctgttaattacacttcctgcccaccacagacctgaataataacccaccgctccttatcaatatggnagcactggctgctattacactttctgctctgcatgatactaccccacattgtagtccacacacacacgcacacactcacacacacacacacacacacacacacacacacactttttttgttggatgaccaattccaaaaaacacagg

SEQ ID NO: 786 - DNA, 20 bp, Oreochromis niloticus
attacacttcctgcccacca

SEQ ID NO: 787 - DNA, 20 bp, Oreochromis niloticus
ttggaattggtcatccaaca

SEQ ID NO: 788 - DNA, 628 bp, Oreochromis niloticus
  misc_feature 2, 4, 5, 7, 9, 10, 13, 14, 17, 26, 29, 30, 44, 45, 47, 55,61, 62, 64, 70, 302, 386, 447, 486, 516, 517, 518, 523, 551, 561, 563, 565, 585, 586, 587, 588, 595, 599, 607, 608, 610,611, 613, 616, 617, 618, 619, 620, 621, 628: n = A,T,C or G
gngnntngnngannttntattggatnatnnaagatctttaatgnntnactccggnggttcnncnctaganctagtggatccccccctgagcccttgaggcaatttgcactaaaaccctgaaagagtggatatgcctatcatgataatcttgaatgtggggcacctggaactgttggctgtgtgtgtgtgtgtgtgtgtgtgtgtgtgtgtgtgtgtgtgtgtgtgtgtgtgttagggtggtggttttccagtatgtttagcctttggttccagctggaaagcattaaaaaaatctgaccctncattgcacttactttgaaatttggtcctctatctgtgtcaagttaaaataaaagcttggcaataaattgtctcagacacttcanaagtaaatgtatgcagactgatgttttgacatgcaaatccccctattgtccccaatgttgngtcaaagcccttttaacttataagacctgggggctgcangaattcgatatcaagcttatcgaaacccgnnnacctnaaggggggccccggtacccaacttttgntccctttaangnangggttaaattgccccccttnnnntaaacantggncaaaaaanntnntnccnnnnnnaaaaaan

SEQ ID NO: 789 - DNA, 17 bp, Oreochromis niloticus
tggggcacctggaactg

SEQ ID NO: 790 - DNA, 21 bp, Oreochromis niloticus
gctggaaccaaaggctaaaca

SEQ ID NO: 791 - DNA, 592 bp, Oreochromis niloticus
  misc_feature 3, 8, 9, 11, 18, 30, 43, 520, 545, 546, 553, 559, 560, 566,577, 580, 584, 592: n = A,T,C or G
ttnttttnntncctcggnttgcccttcgtntacccggcccccnctcgaggtcgacggtatcgataagcttgatatcgaattcctgcagcccccactctaactcaattattgcatcttagctagtgtcccagtgaaacagtgattaatattcatgcagattaaccaggaaacaattgtgtgtgtgtgtgtgtgtgtgtgtgtgtgtgtgtgtgtgtgtgtgtgtgtctgtgtgtgtctgtgtgtgtgtaattcataggcattttgagagtgtatagggactagctcacatttggagccagcctcaagtgctgatttgaagatcttctgtttgtggcagttgcacatcgactttaattttcaccactggagtcgcttgacccaatgcagaagtgcttttgatctgcctttctaatgactggcagtaggtgaatcctttttttttttttattttgttaacaaactcaaattgcatagaagtctatgtaaaaacaaccgttctttggtctcactagttttatgntataacccaaataatggtcatttanntaagttntgatcnnaaaagnacataagatanttngggntttttaan

SEQ ID NO: 792 - DNA, 19 bp, Oreochromis niloticus
agctagtgtcccagtgaaa

SEQ ID NO: 793 - DNA, 21 bp, Oreochromis niloticus
attagaaaggcagatcaaaag

SEQ ID NO: 794 - DNA, 806 bp, Oreochromis niloticus; identical to SEQ ID NO: 331
  misc_feature 3, 4, 5, 12, 13, 14, 17, 30, 39, 463, 515, 532, 548, 616,642, 649, 650, 658, 663, 665, 680, 694, 712, 725, 730, 733, 748, 749, 752, 757, 761, 768, 771, 774, 775, 782, 785, 788,804, 806: n = A,T,C or G

SEQ ID NO: 795 - DNA, 21 bp, Oreochromis niloticus
agtttccttttacactgctcc

SEQ ID NO: 796 - DNA, 18 bp, Oreochromis niloticus
tccacgggttactgaaga

SEQ ID NO: 797 - DNA, 595 bp, Oreochromis niloticus
  misc_feature 2, 3, 4, 5, 8, 12, 40, 87, 317, 320, 336, 341, 350, 355,383, 401, 461, 488, 493, 495, 499, 512, 517, 526, 534, 540, 542, 545, 546, 554, 563, 565, 570, 574, 578, 584, 590, 591,592, 594: n = A,T,C or G
tnnnnctncgtnacccctttggaataccccgccccttctngaggtcgacggtatcgataagcttgatatcgaattcctgcagccccnatgaccacagcgtgtggatgaattacctctaaatattgcggcttatccctctgtaagtgacactggtgttagattgcaaactgacagtcagctgccataactaaagagattttctaaatatctgtgtgtgtgtgtgtgtgtgtgtgtgtgtgtgtgtgtgtgtgtgtgtgtgttctcgtgtgtgtgtgtgtgtgtgtggctgctgagctggagtgattatggggtttagntgnccgtttgcgtggctgnggtgntgacacacnttgtntactatgtgatgttcccgtttaggcagngtggtaaaagcgaggtancaagaaattccttgtctgacatttaatggactgtaacctactctatttgaccgctcacangttattgaatctctgtcttaaacatangttantngggnggatccacctatntctanaagcggccnccacctcngtggancnccnntccccctntagtgagtngnatacncccngctnacttgncccctnnntnc

SEQ ID NO: 798 - DNA, 18 bp, Oreochromis niloticus
gcggcttatccctctgta

SEQ ID NO: 799 - DNA, 21 bp, Oreochromis niloticus
taaaccccataatcactccag

SEQ ID NO: 800 - DNA, 653 bp, Oreochromis niloticus
  misc_feature 2, 5, 7, 12, 13, 21, 23, 24, 25, 27, 30, 33, 35, 37, 41,45, 61, 69, 86, 135, 194, 195, 270, 292, 320, 330, 360, 388, 391, 395, 405, 416, 424, 431, 455, 463, 470, 480, 490, 497,505, 506, 507, 509, 512, 513, 517, 519, 536, 542, 555: n = A,T,C or G
  misc_feature 559, 566, 570, 572, 574, 577, 578, 585, 586, 588, 600, 606,615, 618, 624, 631, 639, 642, 650: n = A,T,C or G
gnagngntgtgnnacttattntnnnanaanaantnanactnaagnctcgcggagtttggcnatctaccnctagtggatcccccccngccttggatctgagtaaacaaatgccaatgttgcacaaacacacacagncacacacacacacacacacacacacacacacacacacacacacacacacacacacacannaaatctgcatttatttgtcccacaagtggaaactctgcattgtcattgcaaaaaagtggacagagcacggtatanaaagtgcactatacaaacaatntggaaacatatatatggacatgagtatncaaaaatatnggtgtatgtatacacacacacacacatatntatctatctatctatctatctatctatntgngagnataactagantttatgcatantatataangggtggntatataaatatataaatatatganggctgtangaattcnatataaaccntatagatacnggggagntccagggnnnanctnntgcncnctttagtgatggttaantgagcngctaacgaaatcntggncataatngggngncntgnntaaaaanntntattcggattancaattncacacaaanatnccaagncggaatnttaaaagngtnaaaccttnggg

SEQ ID NO: 801 - DNA, 21 bp, Oreochromis niloticus
cggcacatacatctactacct

SEQ ID NO: 802 - DNA, 17 bp, Oreochromis niloticus
tcaccatcaacgctgaa

SEQ ID NO: 803 - DNA, 118 bp, Oreochromis niloticus
  misc_feature 73: n = A,T,C or G
gagagaacaagaggcaggttagcaccacggacccacacacacacacacacacacacacacacacacacacagngttttcatgtttgtggggacatctcattggcataatgctttccct

SEQ ID NO: 804 - DNA, 20 bp, Oreochromis niloticus
aagaggcaggttagcaccac

SEQ ID NO: 805 - DNA, 20 bp, Oreochromis niloticus
agggaaagcattatgccaat

SEQ ID NO: 806 - DNA, 584 bp, Oreochromis niloticus
  misc_feature 1, 2, 5, 6, 10, 14, 16, 88, 568: n = A,T,C or G
nnttnnttgnagtnanctctttggatacccggccccctctcgaggtcgacggtatcgataagcttgatatcgaattcctgcagccccntcgaggctcggaaacctttacttcattatacacgtccttagatgtgttcattttagacacactgcatgtggtgattacgtggtgatcaggtggagctcgaaacaaggaaaaagatgttattttgcttaaatctgagaaaaaatgcatggaccttggttgggaattatctcccagattgttcttgtttctttcttggctctgcttgcacacacacacacacacacacacacacacacacacacacacacacacacacacacacaggaagtatcacatgtctgggtgataaatgtcacccctgaggtgtctggcagacgtatatctgataatatttaattgacgtatagagtgcatgtctccacaactgcagggggggatccactagttctagagcggccgccaccgcggtggagctccaattcgccctatagtgagtcgtattacgcgcgctcactggcccgtcgttttacaacggtcgtngactgggaaaaccctg

SEQ ID NO: 807 - DNA, 20 bp, Oreochromis niloticus
cttgtttctttcttggctct

SEQ ID NO: 808 - DNA, 20 bp, Oreochromis niloticus
ctcaggggtgacatttatca

SEQ ID NO: 809 - DNA, 609 bp, Oreochromis niloticus
  misc_feature 2, 3, 4, 5, 7, 8, 9, 10, 11, 13, 14, 17, 18, 19, 22, 23,24, 27, 30, 32, 39, 41, 45, 87, 106, 538, 564, 565, 566, 582, 586, 605: n = A,T,C or G
gnnnngnnnnntnnttnnnttnnnttnagnanatttaangnaacnctcgcctattttggaaaaccgacccgtatcgataagcttganatcgaattcctgcagcccntttggcagagacaccagcaccagtgggggggtgttcctcaagctgcccatgccacccaaacacacacacacacacacacacacaccctcctctcacttttcatttctctacatctgtttttcccccaaatttacttcaaataagagcaaacgccggctctggaacgcctcctataaatccgaggagcgttacgaagacggggtttaggggtctgagttaaaataactggctgtctaatcatctgcacaacaatatttgctgtgaggcattctaaatagattatcgctagtccatctgtgtcatcattgatttataaggcattaagctgctcggggaagagataggggggggggatccactagttctagagcggccgccaccggcggtggagctccaattcgccctatagtgaggtccgtattacgcgcgctnactggccccgtcgttttacaacggtnnnggactgggaaaacccngggnggttacccaacttaatcgncttg

SEQ ID NO: 810 - DNA, 19 bp, Oreochromis niloticus
gcagagacaccagcaccag

SEQ ID NO: 811 - DNA, 21 bp, Oreochromis niloticus
ttataggaggcgttccagagc

SEQ ID NO: 812 - DNA, 814 bp, Oreochromis niloticus
  misc_feature 9, 11, 13, 53, 137, 428, 535, 565, 583, 584, 596, 597, 615,626, 630, 670, 671, 681, 690, 698, 701, 704, 706, 732, 742, 760, 774, 779, 784, 787, 792, 804, 805, 806, 813: n = A,T,C or G
ttggttgtnananccctttggaaagccccccctcgaggtcgacggtatcgatnagcttgatatcgaattcctgcagcccccgagcggttgatggcggggatctcagagtagacgtcagaggattctgggtaattttncaccaccaggttacaggtgtgatgaagcagagactgacggtggaccgtgtccttcacctccaccactttctccaggtaactcagctcaaagcctttagcctgcgcacacacacacacacacacacacacacacacacacacacacacacacacacacacacacacacacacacacacacacacacacactcactcagaggacgacgttcgatctccgcctgaaatctctaatcttgactccttatttagaggaataacaaactgggggggatccactagttctagagcggncgccaccgcggtggagctccaattcgccctatagtgagtcgtattacgcgcgctcactggccgtcgttttacaacgtcgtgactgggaaaaccctggcgttacccancttaatcgccttgcagcacattcccctttngccagctgggcgtaaatnncgaagaaggccnncaccggatcgccctttcnaacagtttgcncacnctgaatggcgaatgggaaattgtaagccgttaatattttnntaaaaattcncgtttaaanttttttgntanaancngcttcattttttaacccattaggccnaaaatcgggnaaattccctttataaatnaaaaaggaataganccganataanggnttgangtggttggttcnnntttggang

SEQ ID NO: 813 - DNA, 21 bp, Oreochromis niloticus
ccttcacctccaccactttct

SEQ ID NO: 814 - DNA, 20 bp, Oreochromis niloticus
agatcgaacgtcgtcctctg

SEQ ID NO: 815 - DNA, 608 bp, Oreochromis niloticus; identical to SEQ ID NO: 332
  misc_feature 2, 9, 13, 15, 21, 39, 43, 91, 115, 551, 562, 569, 590, 596,601, 603, 607: n = A,T,C or G

SEQ ID NO: 816 - DNA, 21 bp, Oreochromis niloticus
tattcaggctcttcttttgct

SEQ ID NO: 817 - DNA, 19 bp, Oreochromis niloticus
cagaatgaactccctccag

SEQ ID NO: 818 - DNA, 537 bp, Oreochromis niloticus
  misc_feature 2, 3, 4, 5, 6, 7, 9, 10, 12, 26, 34, 36, 38, 43, 55, 356,366, 406, 427, 458, 464, 465, 467, 475, 479, 481, 497, 498, 501, 507, 509, 517, 518, 519, 520, 526, 528, 529, 530, 533,536: n = A,T,C or G
gnnnnnngnnangtatattgttatangagatcanangnatacnccccggttttgngaaatagacctagtggatcccccccaagctggtgtcaggctgtgtgttaatactgaagcctgtctgcccttaggaagaatggataaggaataaaggcagacacatattactctgcgtgtgtgtgtgtgtgtgtgtgtgtgtgtgtgtgtgtgtgtgtgtgtgtgtgtgtgtgtgtgtgtgtgagagagagacagagtgtgtgtcctgtgcactgcagttcctgatttacattaaatgatcatcacccgagcagagagaagttctagcacattttaagccctcgaccgcaccctgttctcantaaatgcctnctttactgtcaggtctgctcctacataccaaatagagcanagagatgaaggggggctgcangaattcgatatcaagcttatcgatacccgancacctnnanggggggcncccngnacccaaattttttggnnccntttaangnaaaggggnnnnaaattngnnnccnccnt

SEQ ID NO: 819 - DNA, 21 bp, Oreochromis niloticus
taaggaataaaggcagacaca

SEQ ID NO: 820 - DNA, 18 bp, Oreochromis niloticus
ggtcgagggcttaaaatg

SEQ ID NO: 821 - DNA, 574 bp, Oreochromis niloticus
  misc_feature 4, 14, 19: n = A,T,C or G
gatncctttgaatncccgnggtggcggccgctctagaactagtggatcccccacagccaggaccgatgtgaactttgcaattcactttgacaatgtgtatgaaattctgaaattaagaaatatgatttttcacacacacacacacacacacacacacacacacacacacacacacacacacacaaagaaaaaaaaacgtaatttatgtttgaaaccaggaacttttttttaatgactgggaaaaatacttgtggaaacctgtaaagttctgtaactgtatctcgtgtagctgcaacaccatcatgtggacaaatctgccaaagttcttgaacatgctttttgtgctagttctcaacattttagatgtctgactgtgggctgcaggaattcgatatcaagcttatcgataccgtcgacctcgagggggggcccggtacccagcttttgttccctttagtgagggttaattgcgcgcttggcgtaatcatggtcatagctgtttcctgtgtgaaattgttatccgctcacaattcacacaacatacgagcccggaagcataaagtgtaaagcctgg

SEQ ID NO: 822 - DNA, 21 bp, Oreochromis niloticus
ccaggaccgatgtgaactttg

SEQ ID NO: 823 - DNA, 21 bp, Oreochromis niloticus
tggtgttgcagctacacgaga

SEQ ID NO: 824 - DNA, 267 bp, Oreochromis niloticus
accagtgataaaatgttattttccaaagagacaagtaagccaaattaatgataatttatttataaaacatctctaaggtggaagtcatgttagaagaaaggaatggagcactgcttcagtgtaatactgagtgtgaatgtgcgtgtgtgtgtgtgtgtgtgtgtgtgtgtgtgtgtgtgtgtgtgtgtgtgtatgcacagcatgagtcacccagcctgcctgtgattggatggtagtttatgggtgagggaggagaaagagagcctt

SEQ ID NO: 825 - DNA, 21 bp, Oreochromis niloticus
taaggtggaagtcatgttaga

SEQ ID NO: 826 - DNA, 20 bp, Oreochromis niloticus
ctcacccataaactaccatc

SEQ ID NO: 827 - DNA, 669 bp, Oreochromis niloticus
  misc_feature 2, 3, 4, 5, 6, 7, 8, 14, 16, 20, 22, 28, 33, 52, 53, 54,64, 465, 479, 496, 508, 518, 520, 521, 526, 539, 543, 547, 555, 559, 561, 563, 564, 565, 569, 575, 580, 581, 582, 584, 585, 587, 589, 595, 596, 597, 598, 599, 600, 603, 611: n = A,T,C or G
  misc_feature 614, 615, 616, 617, 618, 619, 620, 624, 625, 626, 627, 628,629, 630, 631, 632, 633, 634, 635, 636, 637, 638, 639, 640, 641, 647, 650, 651, 653, 657, 658, 659, 660, 667: n = A,T,C or G
gnnnnnnnagggtntnttgntnttgggntaaanggaatgctcgccggttctnnnctagacctantggatcccccatctgtgttttaaccatagattatacaacacacatatacgcacacacacacacacacacacacacacacacacacacacacacacatatatatgtatatatattcttattagcgccaaagttgagcattttaacaatggagtgcatgaggattgactaaactgcagtttttgacatgatggttgatgaatctggacatgttatggttaaatgttccattccctacactttataagcagaatgtaaggagagatgaggtctgagtttttaaccaaacctttgaaaaatgcatgtgctatatttactgcttcagttttaggcgataagtcagagatggtgctcttgaatttatgggggtaaggaataaccaacatggttggtgcacccgggtnggtcaaaccttttnttttgaaaactgggcanccaatttttttnaaagggcccngnnaaaanttgccccaagggnaaantttnggggttcnaaangngnnntttngctccncccannngnngngnaaaaannnnnntgnaaaaaaanggnnnnnnnaaannnnnnnnnnnnnnnnnnaaaaanaanncntttnnnnggggggnca

SEQ ID NO: 828 - DNA, 21 bp, Oreochromis niloticus
catctgtgttttaaccataga

SEQ ID NO: 829 - DNA, 18 bp, Oreochromis niloticus
ttggcgctaataagaata

SEQ ID NO: 830 - DNA, 192 bp, Oreochromis niloticus
tggtgtcccaagaaaaccaggacaccgccacacacacacacacacacacacacacacacacacacacacacacacacacacaaacctaaaagggaaacaagggacacaagcacaatgcataaccctggctggggactgccagcacaagataaccccagaaaatgtttatcaagcacatgagtcctgggtccc

SEQ ID NO: 831 - DNA, 20 bp, Oreochromis niloticus
gtgtcccaagaaaaccagga

SEQ ID NO: 832 - DNA, 20 bp, Oreochromis niloticus
gacccaggactcatgtgctt

SEQ ID NO: 833 - DNA, 614 bp, Oreochromis niloticus
  misc_feature 3, 7, 9, 24, 27, 46, 52, 85, 461, 577, 591, 610, 612: n = A,T,C or G
ctntgantnctttggcctttccanacncctttcggggttttggagnccgacngtatcgataagcttgatatcgaattcctgcagnccctttttctccccgagagactgcacacaacattaaagcctagtgttgtgtgtaaatgtggtttgcacaaatcacatccctgtgccagaatccatacgtccagtcaagcacagtcagaacgaacacacacacacacacacacacacacacacacacacacacacacacacactcccagacaatgctctctgtcatcctacctcagggctccatctctcatttaccctgtttgccatggcaacatggtttgggggggggatccactagttctagagcggccgccaccgcggtggagctccaattcgccctatagtgagtcgtattacgcgcgctcactggccggtcgttttacaacgtcgtgactgggaaaaccctnggcgttacccaacttaatcgccttgcagcacatccccctttcgccagctggcgtaatagccgaagaggcccgcaccgatcggcctttccaaacaagttgcgcaacctggaatggcnaatgggaaattgtnaagcgttaattatttttgntnaa

SEQ ID NO: 834 - DNA, 18 bp, Oreochromis niloticus
ccctgtgccagaatccat

SEQ ID NO: 835 - DNA, 21 bp, Oreochromis niloticus
ggcaaacagggtaaatgagag

SEQ ID NO: 836 - DNA, 603 bp, Oreochromis niloticus
  misc_feature 7: n = A,T,C or G
ctttganaccgttgggtaccgcgccccccctcgaggtcgacggtatcgataagcttgatatcgaattcctgcagcccccagcttacctccccattgactggagctgagagacattttcaaaagttaaaagacagagaaggaaatgcagggtcaccgggctgaggagggtcgctcccccctaacgctacacaggaaacggggttagaaacacatttagccataaatgacaggtaaccacttcctgatcccccccttgacatccacaacagctcccgtaagtgttgactgacagcatccccctttattccatttttctgctcataacaaggcagtgattgatgactgtttgtcctcgtgtgccatttttctgtatattcacattttagccaacacacacacacacacgcacacacacacacacacacacacacacacacacacagctctggctcatttacagggcatctgtgaaggttgaaacctcctcttagcaagtcaagtgagatcattctcctaccacccctccctcttgcctacccacatacaaaaaatacacacatgcacacacgcacagttttgctcaacccatcaaaaagagtcgca

SEQ ID NO: 837 - DNA, 21 bp, Oreochromis niloticus
atccccctttattccattttt

SEQ ID NO: 838 - DNA, 18 bp, Oreochromis niloticus
ggaggggtggtaggagaa

SEQ ID NO: 839 - DNA, 550 bp, Oreochromis niloticus
  misc_feature 3, 4, 5, 7, 8, 10, 12, 21, 23, 25, 26, 27, 30, 32, 35, 37,38, 42, 46, 53, 54, 121, 513: n = A,T,C or G
ggnnngnngnanttatttttntnannnatntnaancnnagcncccncgttggnngccgctctagaactagtggatcccccaaacacctaaatgcattatcactattaataaatgcgtcaangcagatgcttgttatatgattatgatgcaatagcaataacaaaataatgaaactagaaatagtaaaatgaaataataaaaatggcagaaaaataacacctcaattcctcacactttctaaatccatgtccagttgactgaattaatacctttatgccaggtggattgcagtcaagttgcagatgatctgattgcatctgacagatgatccatgaaaacgatgcacctgagatcagttttaagtgtcattgcaaaatgtgtctatacacacacacacacacacacacacacacacacacacacacacacacacacacacacacacacacacacacgggtgctaggctagacccctcatgctaaccaagcctaccacagccatgagcgacaganataaatatgaagacataccggcttggacatcgtctgg

SEQ ID NO: 840 - DNA, 19 bp, Oreochromis niloticus
catgaaaacgatgcacctg

SEQ ID NO: 841 - DNA, 21 bp, Oreochromis niloticus
tagcatgaggggtctagccta

SEQ ID NO: 842 - DNA, 632 bp, Oreochromis niloticus
  misc_feature 2, 3, 4, 5, 6, 7, 9, 10, 12, 13, 15, 17, 21, 22, 24, 26,45, 51, 54, 492, 524, 538, 557, 598, 618: n = A,T,C or G
gnnnnnngnnanntntnttgnncnangggagtttgatgcacttcncggtgnctnccgctctagaactagtggatcccccatcgcaggaggctttaccacatgtttagatctgaacagtgcactgtgagatcaaacacacaccaggtgctctcatgtaatcacatctgtttcaaatgtagtctgtgtgtgtgtgtgtgtgtgtgtgtgtgtgtgtccaggacaccatgttcaagagcatcatatcgtatgtcactacatcaacacataattagacacagatcttagtcgccctgaagagtcggggtgacagagacgcaacttgaccaaaatcacccactcacactctcagtgcagaacatgatattagaagcagccctgctgtcacactgctgggagttgtagatgagacaagctaagatgatggaaggtgggtttacatgcatctcctcatgccagtagcttctctgggttcttgcagagggtttgcagcangcttctttggaagttttcttcaggtatttcangaaccaggaactcngcagtagatcaaatttgcngtaaacaattaaacataactgcacaggtggctggaccccantggatgctgcacatactgtnaaactctacttttt

SEQ ID NO: 843 - DNA, 19 bp, Oreochromis niloticus
cgcaggaggctttaccaca

SEQ ID NO: 844 - DNA, 21 bp, Oreochromis niloticus
tcaagttgcgtctctgtcacc

SEQ ID NO: 845 - DNA, 611 bp, Oreochromis niloticus
  misc_feature 2, 4, 24, 25, 30, 39, 58, 98, 516, 540, 604, 611: n = A,T,C or G
tntntcttttgataagtagatccnnttggnaccgccctngcggttcgctctagaactngtggatcccccaaagcagcttaaagcaacacgggctcgcngtcagagcataactagtgtcataaaattcaagtaactgctaattgctgctctctatacaaaagtggattcagttaacagccacaactgaaaaactgaaatagcgtccaggaaaatgaaaaatctcactaaactcatctttaatatttcaatttattttctcatagtcgggaagacatgctgtaatacgcacacacacacacacacacacacacacacacacacacacacacacacacacacacacacacacacgtatagaatttcctgtcatgttgcccaattcactgcttttgggctgcaggaattcgatatcaagcttatcgataccgtcgacctcgagggggggcccggtacccagcttttgttccctttagtgagggttaattgcgcgcttggcgtaatcatgggcatagctgnttcctgtgtgaaattggtatccgntcacaatttcacacaacatacgagccggaagcataaagtgtaagcctggggtgcctaatgagtngagctan

SEQ ID NO: 846 - DNA, 21 bp, Oreochromis niloticus
gccacaactgaaaaactgaaa

SEQ ID NO: 847 - DNA, 18 bp, Oreochromis niloticus
gggcaacatgacaggaaa

SEQ ID NO: 848 - DNA, 593 bp, Oreochromis niloticus
  misc_feature 10, 11, 39, 114: n = A,T,C or G
ttttgactcnnagccctttggaatacccggccccttctngaggtcgacggtatcgataagcttgatatcgaattcctgcagcccattttatatcaagatctaaagtatcacatntagtggaattttcattaactcaccagaataaacaaagttcaaaagtagcagaggaaggagacagcgcaatgttaagaaattcatcttaaaatctatatccactctgtaacacacaagacgtcactctatgggtcccatatatagtccctgaagggctcctgtgtgtgtgactgcgtgtgtgtgtgtgtgtgtgtgtgtgtgcgcgctaataaaaactgctcagcagaaatgagcatcagcctcatcctgtaattagacctctctgctttgtaacagcttttttttgaatggttgagttagaagggcagtttttgcggcttcctgattggaagtagtgatctatctatctatctatctatctatctatctatctatctatctataatatattaaatattaatatactgtatattatattaaagatgtcattaaaaaatacaatccaaacattatggaacgaccccattacattcaggggg

SEQ ID NO: 849 - DNA, 21 bp, Oreochromis niloticus
agacagcgcaatgttaagaaa

SEQ ID NO: 850 - DNA, 18 bp, Oreochromis niloticus
aggatgaggctgatgctc

SEQ ID NO: 851 - DNA, 325 bp, Oreochromis niloticus; identical to SEQ ID NO: 333

SEQ ID NO: 852 - DNA, 20 bp, Oreochromis niloticus
tgcgcttgttaattgaatcg

SEQ ID NO: 853 - DNA, 20 bp, Oreochromis niloticus
tcctgctttggctttacaga

SEQ ID NO: 854 - DNA, 255 bp, Oreochromis niloticus
attcatcaaacttcagattagttggtccctggttgcttggaagtttttcattcacaaaggattaagggattcaaggaaagaaggaaaagtgaaaaggggggttatgactgaaggagatacacagaacccatatatcctgctgtgtttgtgtgcacagagatgcgtgtgtgtgtgtgtgtgtgtgtgcgtgcacaagtgtgtgtgtgtgagtgagaagtcaagcagaacctaacaaacactgaatatggatgagga

SEQ ID NO: 855 - DNA, 20 bp, Oreochromis niloticus
tagttggtccctggttgctt

SEQ ID NO: 856 - DNA, 23 bp, Oreochromis niloticus
cagtgtttgttaggttctgcttg

SEQ ID NO: 857 - DNA, 621 bp, Oreochromis niloticus; identical to SEQ ID NO: 334
  misc_feature 3, 7, 8, 9, 13, 14, 24, 39, 621: n = A,T,C or G

SEQ ID NO: 858 - DNA, 20 bp, Oreochromis niloticus
ggattaacctgtgctatgga

SEQ ID NO: 859 - DNA, 21 bp, Oreochromis niloticus
actacagggagtgtgagtgtg

SEQ ID NO: 860 - DNA, 605 bp, Oreochromis niloticus
  misc_feature 11, 17, 30, 428: n = A,T,C or G
gtttgacaacnttgggnaccgcgccccccntcgaggtcgacggtatcgataagcttgatatcgaattcctgcagcccaaatcagtatgtgcatgttgtattgcacatgtgtattagctcagtcgtgtccttgcctcagcctcacctcttggggacaaaggctcttttcaccacacactctctctctttcactcctctttttctgtctctctctctctctctttctctctcacacacacacacacacacacacacacacacacacacacacacacacacacacacacacacacacacacacacacacacacacgcacgtgcagacccataagggcgtatttggagagcaagtagatcttgttacctgtgatctctctctccctcacacacatgctcgctaagggggggatccactagttctagagcggncgccaccgcggtggagctccaattcgccctatagtgagtcgtattacgcgcgctcactggccgtcgttttacaacgtcgtgactgggaaaaccctggcgttacccaacttaatcgccttgcagcacatcccctttcgccagctggcgtaatagcgaagaggcccgcaccgatcgccc

SEQ ID NO: 861 - DNA, 18 bp, Oreochromis niloticus
gcctcagcctcacctctt

SEQ ID NO: 862 - DNA, 21 bp, Oreochromis niloticus
ctctccaaatacgcccttatg

SEQ ID NO: 863 - DNA, 606 bp, Oreochromis niloticus; identical to SEQ ID NO: 335
  misc_feature 20, 383, 436, 437, 496, 497, 508, 512, 513, 517, 551, 558,569, 587, 605, 606: n = A,T,C or G

SEQ ID NO: 864 - DNA, 21 bp, Oreochromis niloticus
tactaaccagcagggcataaa

SEQ ID NO: 865 - DNA, 20 bp, Oreochromis niloticus
ctctccctgttcctgtcact

SEQ ID NO: 866 - DNA, 316 bp, Oreochromis niloticus; identical to SEQ ID NO: 336
  misc_feature 36: n = A,T,C or G

SEQ ID NO: 867 - DNA, 20 bp, Oreochromis niloticus
ttttgcatgccgtgtttcta

SEQ ID NO: 868 - DNA, 20 bp, Oreochromis niloticus
gcagctcagtccctcatcac

SEQ ID NO: 869 - DNA, 636 bp, Oreochromis niloticus
  misc_feature 2, 7, 8, 9, 10, 11, 14, 15, 25, 33, 34, 35, 39, 43, 51,66, 372, 484, 522, 578, 594, 597, 603, 608, 611, 619, 624, 636: n = A,T,C or G
gnagggnnnnnttnnagcttatctntgacttgnnnaacnaagngaaaaccncgccccttttggagnatcgacccgtatcgataagcttgatatcgaattcctgcagcccctttatctgaggttgtttgatgaaaattggggaatattgctggattatttgctgatgcttatcaagagagggtcaggttttatggaacaaagaatattgaaaatcttaaaagctgtaacactgcaccgagtgtttttggttcatttcaccgtctataattataacacacctctttctgtattcttccatccttgtccgtaagtctgtctgcattcttacgtgtgtgtgtttgtgtgtttgtgtgtgtgtgtgtgtgtgtgtgngcaaatctttttgtctagtgtttgcagtaatctgagtgtttcagaaggtggacccaagactacactctataaacattcatagcatctatatcctgtaaaaatatgcatatanacaagttacatattaacacctgcagtcacaatagctancgatggctttcgctttattccggaattttctggaaatctcttttcccccctacggngtaaaaaaatatttgnccntaaggnaaaanatnggcccctnttttnttacaaaaaccn

SEQ ID NO: 870 - DNA, 20 bp, Oreochromis niloticus
ccgagtgtttttggttcatt

SEQ ID NO: 871 - DNA, 21 bp, Oreochromis niloticus
gtagtcttgggtccaccttct

SEQ ID NO: 872 - DNA, 581 bp, Oreochromis niloticus
  misc_feature 32: n = A,T,C or G
gaattcatttgcattcccgcggcggtggccgntctagaactagtggatcccccatccagattgtggctgcaatgatcattttcacgctcccttgcctcaccttgtcacctgtttcaattaacatacattttgtggatcaggaaaggtaagtctaccaaatgctgagaccagaaatgtaatcagtgccacaatagtatattacagcatttgtcactgatagtaacacattcaaatacacacacacacacacacacacacaaaatatttgtttggtgaaatttcacagatgtatgcaatcagatacattctccagtcctgcaaaaagcacagtgtgtaacttgtcatcttactctcagagtctgtcaacacgctgagtaaataaagtaataaaacaactgggcaacatggtgttggatcttttgtgggctgcaggaattcgatatcaagcttatcgataccgtcgacctcgagggggggcccggtacccagcttttgttccctttagtgagggttaattgcgcgcttggcgtaatcatggtcatagctgtttcctgtgtgaaattggtatccgctcacaattc

SEQ ID NO: 873 - DNA, 21 bp, Oreochromis niloticus
atgtaatcagtgccacaatag

SEQ ID NO: 874 - DNA, 19 bp, Oreochromis niloticus
ttactcagcgtgttgacag

SEQ ID NO: 875 - DNA, 659 bp, Oreochromis niloticus
  misc_feature 3, 5, 8, 14, 16, 40, 563, 604, 611, 612, 641, 652: n = A,T,C or G
gtnanttntttctncnatgtctctttgaaagccccccgcnttggcggccgctctagaactagtggatcccccaaacaacactaacaatgcagcacaccaggctggaaggaagcacacaatgaatacctctgactccggtctgtgttgggctcataggtccgtttgagttatctgtaggagacatccctgtcttacactgaactttactaagctgcagctctttcctctccactcactttccttttcctcaagtctctcctgaccccactgtcattgtcgccattgatttccatctactttgcttttgctgaatcccgctgatgtcgccaacgtcacttccatctgcctgtctgtccgtcaggctgctgtcccacgacactgaagcagctcgtgagggcgaggaggaagagaagcagaaagaccgggggttggggtgaaaagagctagattcatttagcacacacacacacacacacacacacacacacacacacacacacacacacacactgacgtaatgagtctaatgatttgcatccagttggaagatcacaaaattgcanggggcttgcaggaattcgatatcaagctttatcgataccgncgacctnnagggggggccccggtacccaagcttttgntcccttttagngaggggc

SEQ ID NO: 876 - DNA, 16 bp, Oreochromis niloticus
ggcgaggaggaagaga

SEQ ID NO: 877 - DNA, 21 bp, Oreochromis niloticus
actggatgcaaatcattagac

SEQ ID NO: 878 - DNA, 802 bp, Oreochromis niloticus; identical to SEQ ID NO: 337
  misc_feature 17, 566, 624, 627, 656, 682, 693, 737, 742, 751, 758, 775,776, 786, 790, 793: n = A,T,C or G

SEQ ID NO: 879 - DNA, 21 bp, Oreochromis niloticus
ttaatcccatcttaatcacaa

SEQ ID NO: 880 - DNA, 18 bp, Oreochromis niloticus
ctgagctaagagcaggtg

SEQ ID NO: 881 - DNA, 598 bp, Oreochromis niloticus
  misc_feature 3, 14, 26, 32, 39, 557, 570, 584, 593: n = A,T,C or G
tcnctttgactctnatccctttgganaccccnccccctntcgaggtcgacggtatcgataagcttgatatcgaattcctgcagcccacatttatacatcaagtccttagtgcacctgttgcaaacgattgaaacatgttttactgtgtttctcagtcataaaaagcttgaaattcttaaaaaggttgttgaacgctcttcttcaatcccagagctttcattaccaattaaactagagctagacacagcctcgcctattggtgtgtgtgtgtctgtgtgtgtgtgtgtgtgtgtgtgtgtgggaaaccccactaaactcaagatgggggtggggtatttaatggtgttcaaaataaaggggggtccacttgtccacagttgctatagaaacaccaaatgtgaaatacaaagcgactccaaggctaaactctatattggtggccacatgcgaaatacatataatgaagtaaaactaggttactttactctacttaaactacctgtctgggattttgtatcaaataaaatcccaacactgtgatgcatttatgatccacnaacattgtgtccngtataactaaactnccccctttnggggc

SEQ ID NO: 882 - DNA, 18 bp, Oreochromis niloticus
cccagagctttcattacc

SEQ ID NO: 883 - DNA, 21 bp, Oreochromis niloticus
ccaccaatatagagtttagcc

SEQ ID NO: 884 - DNA, 665 bp, Oreochromis niloticus
  misc_feature 2, 3, 6, 19, 46, 117, 586, 594, 661: n = A,T,C or G
annttngaagcccttggancggcccccccctttaggtcgacggtancgataagcttgatatcgaattcctgcagcccacaacaacacgcagctgcttccgtgctgcacttttactgngggcggggcttcgctcacacacacacacacacacacacacacacacacacacacacacgaaagcaggtgaggcaagataaggtgttgctcaggactaacaggtgtttttacctgcagacgctttactgacacagtttggaagaacgagtctgaacagactttgttcaattaatgataacgagtcagatgttgactttgattaaaaacaagcagtgacatcataatcataatcagtcatcaacactaatactcatgttattctgttaatctcccattattactacattacctgctgtaacacagaatacttcattgttctgttttgactttatttgttactcaaatatttgatatgctgacagcagaagtctgttattaagttataagctcgtataaatactcagaagcaacaatgatgatgatgtttcaagctgctgtaacacaggatgaatgaagcctgtgtgtgtgncgtcctgnggggggatccactagtttctagagcggccgccacccggcggtgggagcttccaattcggcctatagngggg

SEQ ID NO: 885 - DNA, 21 bp, Oreochromis niloticus
tgggagattaacagaataaca

SEQ ID NO: 886 - DNA, 18 bp, Oreochromis niloticus
ctgcacttttactgaggg

SEQ ID NO: 887 - DNA, 441 bp, Oreochromis niloticus
  misc_feature 104: n = A,T,C or G
tcataagaaagttgatgttctgtatatctgcagttttcgtgtgtgtgtgtgtgtgtgtgtgtgtgtgtgtgtgcatcaaatctgttaggcattgcaaacattgnggagggatgttcagaaatttgaacacatacagtgatacagagggagattaaaaggtatgtctgtgatttgaatggctctttctcctcacattttcatttctaacatttacatacgttaatcttcacatatacatttccgatgtgtttggtgtcacaaccttttccagtctatcgctgttccagcttccgttgttgctaatgtgactgtgagtggtaagaaggcaaaaactgtgaagtgactcacacataagtatctttaacaattttcagcctagcgggtaggtctgccaatatgtcagtggggctggcacccctgatgggcacacatcattgatat

SEQ ID NO: 888 - DNA, 27 bp, Oreochromis niloticus
aagaaagttgatgttctgtatatctgc

SEQ ID NO: 889 - DNA, 21 bp, Oreochromis niloticus
tgaggagaaagagccattcaa

SEQ ID NO: 890 - DNA, 135 bp, Oreochromis niloticus
agccttttcagtctttgtatatgtgtacagtacgtatatgtgtgtgtgcgtgcctgtgtgtgtatacgtatatatgtgtgtgtgtgtgtgtgtgtgtgtgatgaatgggcaagtgccaagcagcgttcccttggt

SEQ ID NO: 891 - DNA, 20 bp, Oreochromis niloticus
gccttttcagtctttgtata

SEQ ID NO: 892 - DNA, 18 bp, Oreochromis niloticus
gaacgctgcttggcactt

SEQ ID NO: 893 - DNA, 640 bp, Oreochromis niloticus
  misc_feature 4, 5, 29, 76, 469, 489, 499, 520, 610, 640: n = A,T,C or G
gttnnaatccttgggaagccccaccgcgntggcggccgctctagaactagtggatcccccacatgggtcagcacanttacaccattaacatgtcaccctggctgcctgcatggacttagcctctgccaatagcaagttggctcctgggcactaatgagtagctaggtaattagaggttggcttgattctaccttactcacaagcaaacaagcacacataaacactctctctctctctctcacacacacacacacacacacacacacacacacacacacacacacacacacacacacacacacacacatttacaaatgcaacacatatctggatgttggtatgtggctctttctctctgcctaaatgggtgggctagccatatgtcacagcagttgtgctgcattagtgcactgggtgatatactttaatgaacctgcttctgagaaggaaagggaaggaggcgtgtttnctaaattttttgggctgcangaattcgatntcaaagcttatcgataccgtngacctcgagggggggcccggtacccagcttttgttcccttttagtgagggttaattgcccgctttggcgtaatcatggtcatagatgttnctggggtgaaaatggtattccgctcacaan

SEQ ID NO: 894 - DNA, 21 bp, Oreochromis niloticus
gacttagcctctgccaatagc

SEQ ID NO: 895 - DNA, 20 bp, Oreochromis niloticus
agccacataccaacatccag

SEQ ID NO: 896 - DNA, 207 bp, Oreochromis niloticus
tgaaagatgaagctactcacctctgagaagtgagtggtttgtctttgtgttttgataaattataatgtgtgtgtgtgtgtgtgtgtgtgtgtgtgtgtgtgtgtgtgtgtgtgtgagaggcacatgtctggaaatgactgttagatgaggaattccataaacgagtgtgcttgtttggtgctgtgatgtcatggagtcagtctgtca

SEQ ID NO: 897 - DNA, 22 bp, Oreochromis niloticus
gtggtttgtctttgtgttttga

SEQ ID NO: 898 - DNA, 20 bp, Oreochromis niloticus
cagcaccaaacaagcacact

SEQ ID NO: 899 - DNA, 391 bp, Oreochromis niloticus
  misc_feature 344, 345, 368: n = A,T,C or G
tcttatctttgtgacatctcactgtgtttttcatgctttgtgtgtgtgtgtgtgtgtgtgtgtgtgtgtgtgtgtaatttccactgcaggaaatatcggagcagagctctcttacaacaatgttggcatgttcatatcatctgatgctggcaatacctggagaccggtgagcctcacacctacatttacacccacagccagcagacctgcagcagtttcaaactttgacagatgatgtaaaaaattaaacacttttacaaatattgtattttctggcttcttgttatgtaacacctttagtttccactccagcttactgcaggttacaacaggcttttttatannacacttcagacacgctacacggnaaagcaagagtgcagacaatgat

SEQ ID NO: 900 - DNA, 20 bp, Oreochromis niloticus
actgtgtttttcatgctttg

SEQ ID NO: 901 - DNA, 21 bp, Oreochromis niloticus
ggtgtaaatgtaggtgtgagg

SEQ ID NO: 902 - DNA, 442 bp, Oreochromis niloticus
  misc_feature 78, 385, 399, 417, 436: n = A,T,C or G
ccctcagttcctgtgacaatgacgtgcagcagtttgttctggttctggtggcgtaacgtttgttttctggggctgctntaatgtttctgtttgacatcgtaaatctttggggtcgtcttattggtcccatcatggtcacatggtctcagatgtttctgtataatcccgctcccacctgcacaccctctgtagtgcaaccgcatatttttatttgactgtgtgtgtgtgtgtgtgtgtgtgtgtgagaactgcagcgtcctgactataaaatgatttagaaggaaaataatttttctttgttggaaccagtttttgaccaccaggtggagctgtggttgctgtgcagggaggcaagcacctgcagccaatcatagccggttgtggntgtttgagctgaanggaactcgtggatgtttncaccttcatgttttaaggntttggg

SEQ ID NO: 903 - DNA, 20 bp, Oreochromis niloticus
gtataatcccgctcccacct

SEQ ID NO: 904 - DNA, 20 bp, Oreochromis niloticus
atagtcaggacgctgcagtt

SEQ ID NO: 905 - DNA, 602 bp, Oreochromis niloticus
  misc_feature 5, 9, 12, 14, 22, 31, 35, 47, 64, 65, 89, 112, 458, 475,521, 602: n = A,T,C or G
atttnaaantgnanacttagangatcctccnctanctgggaaaaccncctaggggatcccccanncacacgcacatatgtcattttttncatatctcagtgagaacatctanggggcataaccctaaccatgacctgtaactgtaaccctgacactaaaccacatttagagtctaaaagatgccttcaaacttgtggggaccatggatataaatacacacacacacacacacacacacacacacacacacacacacacactcaggtgcaggtctcgagagcagagcaggacttggtcctgtgcagcttctcccagaagttggagtcaagcggggggctgcaggaattcgatatcaagcttatcgataccgtcgacctcgagggggggcccggtacccagcttttgttccctttagtgagggttaattgcgcgcttggcgtaatcatggtcatagctgnttcctgtgtgaaattgntatccgctcacaattccacacaacatacgagccggaagcataaagngtaaagcctggggtgcctaatgagtgagctaactcacattaattgcgttgcgctcactgccgctttccagtcgggaaaccn

SEQ ID NO: 906 - DNA, 21 bp, Oreochromis niloticus
acctgtaactgtaaccctgac

SEQ ID NO: 907 - DNA, 18 bp, Oreochromis niloticus
aagtcctgctctgctctc

SEQ ID NO: 908 - DNA, 596 bp, Oreochromis niloticus
  misc_feature 2, 3, 8, 24, 26, 42: n = A,T,C or G
tnnaagcnctttggaagacccgcngngtttggcgatctagcnctagtggatccccccctggggaatcattattttaacaagtgtcctcacaacaatagttaaacaaacgtgtgtgtgtgaaaggggaacattccatccattcttggtcttcctgaggaaaaagcaaaaacatcacacacacaaactgacacacacacacacacacacacagactgttgacagcaggcagcaggaaaggtgcacatacacgcctctaaggtcattcacacatccgcctcgtctttcagctctccgcccatcaagtcctagtagttttagccatcaatccatctggcagtccatttttattttggcagacatgcttctcctgccattagtctacaattcaaaactactcctacattaagtatacaatgaatatcctgtgggctgcaggaattcgatatcaagcttatcgataccgtcgacctcgagggggggcccggtacccagcttttgttccctttagtgagggttaattgcgcgcttggcgtaatcatggtcatagctgtttcctgtgtgaaattgttatccgctcacaattccacacaacatac

SEQ ID NO: 909 - DNA, 18 bp, Oreochromis niloticus
cattcttggtcttcctga

SEQ ID NO: 910 - DNA, 21 bp, Oreochromis niloticus
aaactactaggacttgatggg

SEQ ID NO: 911 - DNA, 586 bp, Oreochromis niloticus
  misc_feature 36, 492, 530, 548, 564, 580, 585, 586: n = A,T,C or G
acctggcaaacaacacactaaggttggacaactggncgaatttatcgaccatcgatcatagactgagcctttcaccgattgtttttacaagagcgatttattcattttcccattagtaagtctgctaataatgttggttgaagctaagagaagcagtccacacacacacacacacacacacacacacacacacacacacacacacacacccccttttccagctgtgagcaaatgcatgctcttcagagtgcgacaaatgactccttttccatggtatgaaacaacatcatttccttgacagatatttagatatagccagagtgcacagtgtccacctggggctgtctttttcatatttaaccattttagtcaaatcactttggatattctgctggtgaaaagcttttccggagcttgtcaatcaaaaagtcaccaaaagtcacctgcatgaatatattgcctatcgtcatttattgggactgatgaatgtcngtttggaaaaaatttttagtttttcaccccaacctttnctaccgcacccaaagttntggtatttagtaattntaaaacctctttaccnaggann

SEQ ID NO: 912 - DNA, 21 bp, Oreochromis niloticus
tggcaaacaacacactaaggt

SEQ ID NO: 913 - DNA, 21 bp, Oreochromis niloticus
gtcatttgtcgcactctgaag

SEQ ID NO: 914 - DNA, 296 bp, Oreochromis niloticus
tgagacttcgtcatcagtggtccacagttttccattcttgtttcccaccgactgaagaaacaaaggcagaagccaatcagattttcactttttctttttgtgcgcgtgtgtgtacacacacacacacacacacacacacacacacacacacacacacacacacacacacttcttgcctacatgtaggggtctccacttacccggtcattcatgagcaagtccttcacaatgaagttggcaacaatggatttcattggggaagcaaactgatctggagccagcatggaaatatgggg

SEQ ID NO: 915 - DNA, 20 bp, Oreochromis niloticus
aaaggcagaagccaatcaga

SEQ ID NO: 916 - DNA, 20 bp, Oreochromis niloticus
tttgcttccccaatgaaatc

SEQ ID NO: 917 - DNA, 606 bp, Oreochromis niloticus
  misc_feature 2, 3, 5, 16, 18, 34, 42, 483, 574, 601, 602: n = A,T,C or G
tnntnttttgactaananatctcttggatacccngccccctntcgaggtcgacggtatcgataagcttgatatcgaattcctgcagccccctatcagcaggtgggcttttggtttagtaaaacacacacacacacacacacacacacacacacacacacacacacacacacacacgtgcatgtaagcgcacacacatacataccacaatgtatacatacagcaacttgtgcacaagcccctttaggtaaaataccttcgagccaacaactccaaatcaagccacccacccccaatgcacacactcacgctctcacataccttggagtaaagcgagcgtagctgagcgctcgcagctcaatccccccaacccctctccccacctttaatctgatttgacgttcagcaatacagggacacacatacgccacacatgcataacatactccttaaatacacacacacagaaggaggaaggccgtgtnaacgtttctgaactgcagtcttgtgtaaacacctgccagtaatctagcagctgagatgaatccagatgaagcagagcctggtttacaggtnctttacaggttggggttacttgggggnngaat

SEQ ID NO: 918 - DNA, 20 bp, Oreochromis niloticus
tatcagcaggtgggcttttg

SEQ ID NO: 919 - DNA, 20 bp, Oreochromis niloticus
ggtggcttgatttggagttg

SEQ ID NO: 920 - DNA, 314 bp, Oreochromis niloticus
  misc_feature 133: n = A,T,C or G
ccatatttccatgctggctccagatcagtttgcttccccaatgaaatccattgttgccaacttcattgtgaaggacttggtcatgaatgaccgggtaagtggagacccctacatgtaggcaagaagtgtgtgngtgtgtgtgtgtgtgtgtgtgtgtgtgtgtgtgtgtgtacacacatgcgcacaaaaagaaaaagtgaaaatctgattggcttctgcctttgtttcttcagtcggtgggaaacaagaatggaaaactgtggaccactgatgacgaagtctcacctgaagttcttgctaaggtaagaggtgat

SEQ ID NO: 921 - DNA, 20 bp, Oreochromis niloticus
aaaggcagaagccaatcaga

SEQ ID NO: 922 - DNA, 20 bp, Oreochromis niloticus
aaaggcagaagccaatcaga

SEQ ID NO: 923 - DNA, 817 bp, Oreochromis niloticus
  misc_feature 3, 8, 9, 26, 54, 78, 159, 162, 189, 388, 398, 400, 408,421, 433, 446, 455, 471, 473, 545, 553, 575, 588, 598, 600, 620, 624, 628, 638, 643, 656, 668, 684, 686, 709, 727, 739,740, 751, 771, 774, 790, 794, 803, 812, 816, 817: n = A,T,C or G
ttnacttnntgattccctttgaaagnggcccgcggccgttttagaactagtggntcccccccaggtgcaggcagacancagatacactcatggaagataaacggacccaacacacacacaagcacgcacaggcacacagcgaaggataaatggacccantancagggaggtctgacagaatgccttttnacacctggctgagcccagcggaaggtgacagagtcacatctcccaaagcgaacacacacacacacacacacacacacacacacacacacacacacacacaccttctcacattggggagttcagggtcataagcagcatcatgaataaaatgaggctgtcttaaacagaaggagctctgtgtatgcatgtgtgtgggtgngtttgtatgngngagactgngtttgtgtttgtncaaggggctgcnggaattcgatatnaagcttatngataccgtcgaccttnanggggggcccggtacccagcttttggttccctttatgagggttaattgcgcgcttggcgtaatcatggtcatngctgtttncttgtgtgaaaatgatattcgntcacaatttcacncaacataccnancccggaagcataaagtgtanaagnctgnggtgcctaangaagngagcttacttacnattaatttggtntgcgcttacttgcccngntttcaagttggggaaacctgtcnatgccagctgctttaaanaaatcggtcaanncccgggggaanaagccggtttgctaattggnccncttttcccttacttgnttanttgactttntgggttggnatgnn

SEQ ID NO: 924 - DNA, 19 bp, Oreochromis niloticus
ccagcggaaggtgacagag

SEQ ID NO: 925 - DNA, 21 bp, Oreochromis niloticus
cctgaactccccaatgtgaga

SEQ ID NO: 926 - DNA, 791 bp, Oreochromis niloticus
  misc_feature 2, 6, 11, 12, 13, 25, 577, 656, 713, 721, 746, 766: n = A,T,C or G
tnttgnactcnnnaagccccttccnagccccccctcgaggtcgacggtatcgataagcttgatatcgaattcctgcagcccccagtataaatgggaggatttcttgttgttatagtgtaataagggtgacgatcaacaggtggagataatggagcttagtttcattgagccaaaaaaatcacacacacacacacacacacacacacacacacacacacacacacacacacacacacacacacacagtctctgtgcaacctcaacacatcaataaattacatcagatgcatagattaccattacaaatcctttccacagtatcagacactgtacgtcttcctcctgtggattaatgtctcgtttcatcagcatccaaaaaaatgctctttgagctttggattgttgaaagtaagaaagtgaagaggaaagtagtagttgcagttgaaacatagagaggtttgggctttttttgcgtggggggagttagactgaagaagatgcaggtgggctgccggcgtatgtgtaaaaacctacttgtgaacttggttgtggggggatccactagttctagagcggncgccaccggcggtggagctccaattcgccctatagtgagtcgtattacgcgcgctcactggccgtcgtttacaacggtngtgactggggaaaacccttggcggttaccccaacttaatcggcttggcagcacaatncccctttngccagcttggcggtaatagccgaanaggccccgacccgaatcggncctttccaaacaggttgggcaagcc

SEQ ID NO: 927 - DNA, 21 bp, Oreochromis niloticus
gggaggatttcttgttgttat

SEQ ID NO: 928 - DNA, 20 bp, Oreochromis niloticus
ggaggaagacgtacagtgtc

SEQ ID NO: 929 - DNA, 329 bp, Oreochromis niloticus
aaaaggggtttgctggcacacaataaaaaaatctacacacacacacactcaggcacagacacacgcagacacacacacatcgcacaggtacaaagaacaaaaaaaacaagctcataaaggcacaaacagacacatctatacacacacacacacacacacacacacactctcacacacatgtgcagccctccggtcctgatcaatacatgacaagagtaaatctcctccggacgtcaggcagtccaatcaaagggcttggtgttcttataggggatcacaagagccagggggagacaaacaatgatgtgaatcctcaacaacaccacaat

SEQ ID NO: 930 - DNA, 20 bp, Oreochromis niloticus
ggtttgctggcacacaataa

SEQ ID NO: 931 - DNA, 20 bp, Oreochromis niloticus
ctggctcttgtgatccccta

SEQ ID NO: 932 - DNA, 586 bp, Oreochromis niloticus
  misc_feature 3, 8, 9, 12, 13, 15, 16, 23, 24, 562, 576, 586: n = A,T,C or G
ttnttttnntcnngnnattcctnnatccccggcggttccgttctagaactagtggatcccccactcagaatctctttcacataccaagcatgcacacagaaacagatacacacacaaactctctcgcaatccatcacacacacacacacacacacacagcgaacaaagtgtcaggtggcagtggaaacgtggtgatttgttcctcctgacagacaggaaataagggagtcgaccagggacctcacttcctctaagatctgactaacctgacatctatcagacaaccccccccacacacatgcattcacactgtcctccaatgtttggtctactctaaaacacatgcacacacacacacacacacataaattcaccatccatcaggctcctaagtccccgcagggggggctgcaggaattcgatatcaagcttatcgataccgtcgacctcgagggggggcccggtacccagcttttgttccctttagtgagggttaattgcgcgcttggcgtaatcatggtcatagctgtttcctgtgtgaaaattgttatccgcttacaanttccacacaacatncgagcccggn

SEQ ID NO: 933 - DNA, 21 bp, Oreochromis niloticus
gacagacaggaaataagggag

SEQ ID NO: 934 - DNA, 17 bp, Oreochromis niloticus
agcctgatggatggtga

SEQ ID NO: 935 - DNA, 871 bp, Oreochromis niloticus
  misc_feature 6, 7, 19, 20, 25, 27, 39, 50, 551, 581, 582, 600, 608, 609,612, 614, 634, 663, 670, 673, 677, 679, 682, 709, 720, 756, 764, 767, 768, 771, 799, 800, 823, 841, 850, 852, 859, 863,869, 870: n = A,T,C or G
ttgatnnaagtgatctcanngaacncncctcaggtttanggaatcgatcncttgatatcgaattcctgcagcccatccattgtaaactttctataaactctgtaaacattgattcaaatataggctgtaatggtaagctgcgttgtctgtagcagcggcattcacagcatctctagcataagcatgaagcttagtcacataccatgtaatgcatgtaggctgcataatggcgtcagcatatgttatgcttccacatccttgaacatcctatacacacacacacacacacacacacacacacacacacacacacacacacacacacacacaccccaacacacacacacacacacaaagactactcagcagcacatgtgctgccacttttcccacagggctctgtagaaataactacaaacacatattgtgggggatccactagttctagagcggccgccaccgcggtggagctccaattcgccctatagtgagtcgtattacgcgcgctcactggcccgtcgttttacaacgtcgtgactgggaaaaccctnggcgttacccaacttaattcgccttgaagnnattcccttttttgccaangtgggggnnatnancaaaaaagggccccgacccngaatgggccttttccaaaaaaatttggcncaaaccnttnaatngngcnaaaatgggaaaatttgtaaagccgttnaaataattttnggttaaaaaattccggggttaaaaatttttttggtnaaaaatcnagnnttnatttttttttaaacccaattagggcccnnaaaatcgggcaaaaaattccccnttttttaaaattcaaaanggaatttgnancccgagnattngggggnng

SEQ ID NO: 936 - DNA, 17 bp, Oreochromis niloticus
ggcattcacagcatctc

SEQ ID NO: 937 - DNA, 20 bp, Oreochromis niloticus
atgtgctgctgagtagtctt

SEQ ID NO: 938 - DNA, 376 bp, Oreochromis niloticus
  misc_feature 21, 55, 58, 68, 71, 74, 372: n = A,T,C or G
ccccattatttattgggggtnccaaattaaggtaaatttagggaaggaagggggnagnaggttagggnagnagnagtcatttcctctcccttctggttggcatggtgcttaagccttcaaaatgctgacatcagcactcagctctgactacaacgaccgaaaacacgcacgcacacacacacacacacacacacacacacacacacacacacacacacacacacacacacagttcagttcagtaacaggtttgagctaaatgctctattcaagatgcatcttaatcagcagcagcatcaacatgattgcgactgcggtgtatgacaaccgcatcatataacatcatctttcattcatcagtggctcagatanctgc

SEQ ID NO: 939 - DNA, 20 bp, Oreochromis niloticus
aagccttcaaaatgctgaca

SEQ ID NO: 940 - DNA, 20 bp, Oreochromis niloticus
gcaatcatgttgatgctgct

SEQ ID NO: 941 - DNA, 471 bp, Oreochromis niloticus
  misc_feature 13, 18, 33, 36, 202: n = A,T,C or G
tggacattgttcnaaccnttttgtgtatacccncanctcgtgtctatggagaccgcagcaacattgagagcaaacaccgggagctcgtttactcgagcgttcacaccgaacctcacttgtgcgttactgtgtgaaagtgcggcacgggttcagtgactcagtaatatctaaacttcgaaataagttgagcttactttatgtncacacacacacacacacacacacacacacacacacacacacacacacaccgggtactgaatttaattaaaatctgggtaactgtctaaagtaatggctgcgttaataagaacacagccaatatcagtataattatcggtggtggtgatcggtgcgtctctcacgcttctttcctgccagactgtcgctctgtgctcagaatgagatctgtcccgtctgagctgttaaccagcccatcttctgttttggggacaaaaacaaacattaaga

SEQ ID NO: 942 - DNA, 20 bp, Oreochromis niloticus
cgaacctcacttgtgcgtta

SEQ ID NO: 943 - DNA, 20 bp, Oreochromis niloticus
cgatcaccaccaccgataat

SEQ ID NO: 944 - DNA, 354 bp, Oreochromis niloticus
atccattgtaaactttctataaactctgtaaacattgattcaaatataggctgtaatggtaagctgcgttgtctgtagcagcggcattcacagcatctctagcataagcatgaagcttagtcacataccatgtaatgcatgtaggctgcataatggcgtcagcatatgttatgcttccacatccttgaacatcctatacacacacacacacacacacacacacacacacacacacacacacacacacacacacacaccccaacacacacacacacacacaaagactactcagcagcacatgtgctgccacttttcccacagggctctgtagaaataactacaaacacatattgt

SEQ ID NO: 945 - DNA, 20 bp, Oreochromis niloticus
tctgtagcagcggcattcac

SEQ ID NO: 946 - DNA, 21 bp, Oreochromis niloticus
acagagccctgtgggaaaagt

SEQ ID NO: 947 - DNA, 618 bp, Oreochromis niloticus
  misc_feature 7, 9, 14, 17, 43, 45, 57, 555, 579, 598, 603: n = A,T,C or G
gaccttntntattncanacagatcttcttggaaacccgccccntntcgaggtcgacngtatcgataagcttgatatcgaattcctgcagcccccttagtgatagacttagcaataccgattggcagtagaaggaacacacacacacacacacacaaatatatatgactgaagaagtcagttggatgactggcaaaatgtttctcctcctgaaaacactatgtccagatgaacagaatcaacctttggggacatatgtatgtatatatatacacataaaataacctgcaataggtgaagtagtagccagctttattttttaattttttattaaggctgtaaaacccctcactaaacactttatagactttttctcagataggcatgaacattttcagacttttctctcttgtttgggggatccactagttctagagcggccgccaccgcggtggagctccaattcgccctatagtgagtcgtattacgcgcgctcactggccgtcgttttacaactgtcgtgactgggaaaaccctgggcgttacccaacttaatncgccttgcagcacatccccctttngccagcttggcgtaatagncgaanaggcccgcacccatc

SEQ ID NO: 948 - DNA, 17 bp, Oreochromis niloticus
gcataccgaaccgaaag

SEQ ID NO: 949 - DNA, 21 bp, Oreochromis niloticus
tgtagaaatgatgagccaaaa

SEQ ID NO: 950 - DNA, 794 bp, Oreochromis niloticus; identical to SEQ ID NO: 340
  misc_feature 5, 6, 7, 8, 9, 11, 15, 25, 34, 598, 658, 669, 776, 786, 794: n = A,T,C or G

SEQ ID NO: 951 - DNA, 19 bp, Oreochromis niloticus
ctaaatctccacgcagtcc

SEQ ID NO: 952 - DNA, 21 bp, Oreochromis niloticus
tgtaattgctccacaaatctg

SEQ ID NO: 953 - DNA, 361 bp, Oreochromis niloticus
gccgtctccttcgactgacagtacagacggcagcgctcgtcagctgagacacacaaacgggtcagtgcaggagtttcacatcattctgaaaacatctgctgacatctgctaacgtctgctaacatctgctaacatctgctaacatctgctcgacactaaagagttaaaggaggagagttttcctccagcagcagattcctcactgatgacttttacatgtgcgcacacacacacacacacacacacacacacacacacacacacacacacgtttctatgtctctgtgaggaccctcagttacataacgtatttccgagactataaatctgaagctggaaacctcgcctgaatctccgaaca

SEQ ID NO: 954 - DNA, 20 bp, Oreochromis niloticus
agagttttcctccagcagca

SEQ ID NO: 955 - DNA, 20 bp, Oreochromis niloticus
ggagattcaggcgaggtttc

SEQ ID NO: 956 - DNA, 655 bp, Oreochromis niloticus
  misc_feature 7, 9, 495, 501, 547, 552, 573, 590, 598, 600, 605, 610,615, 626, 630, 634: n = A,T,C or G
ttgtttncntccgttggaagccccccgcggtggcggccgctctagaactagtggatcccccacgcaccagcataaagccatccacatacatttcaaatcaaactgtgtttagagaaaccgcaacctcttcttttcagatgtgactcccagctgcctggaggaaaatggattaacacacacacacacacacacacacacacacacacacacacacacacacaagctctgtccacacctccaatcacgttctagcacaccaagtgcttcacccaccccctattaacgcacacattcacacgcagaggggatctctctctttttgcacaagtctattattagctgttcaacccagagacaaactaatgacacgttgggatgaatcaccagagctgctgccttcgactatcattacactcacagcagagctactgtagagacatccatgtaggatgctgggggctgcaggaattcgatatcaagcttatcgataccgtngacctngagggggggcccggtacccagctttttggttccctttagtgagggnttaanttggcgccgcttggcgtaatnatgggcatagctgtttncctgggtngnaattngttantccgntcacaaatttncccncaancattacggaggcccgggaagc

SEQ ID NO: 957 - DNA, 21 bp, Oreochromis niloticus
aaaccgcaacctcttcttttc

SEQ ID NO: 958 - DNA, 20 bp, Oreochromis niloticus
gttaatagggggtgggtgaa

SEQ ID NO: 959 - DNA, 553 bp, Oreochromis niloticus
  misc_feature 2, 4, 5, 6, 7, 8, 9, 11, 12, 15, 18, 20, 23, 25, 27, 29,36, 39, 40, 50, 56, 58, 101, 102, 553: n = A,T,C or G
gngnnnnnngnntanttntnttntntntntagatcnaanngaactctccngcgttngnggccgctctagaactagtggatcccccacgtgcgtgcagctgnngagcaccttgctcatttgcactgtgtaactattcatttttatatgcttgtttctctttatgaataataaaccagcgtgtatcccagcctctctcttaggtcgtgcatatgtgcccagatgttccagcagtcacttaatgtgtttttattgttgatggatctgttttcttctgacagccagactgcatgctcatctcaagagagggctgtatctatgtgtgtgtgtgtgtgtgtgtgtgtgtgtgtgtgtgttgctcactgggcttctacagctacagtctcttaataatagatcgccatcatggtaaccgttgttgtgctgaccttaagtgctgcacagtgctaaaacagacaccagcctcgactagtgttttcctgctgaagtaagtgcaccgtcatccacagtctgtctctctctgactgaggacagacagacagccaagcagaggagn

SEQ ID NO: 960 - DNA, 21 bp, Oreochromis niloticus
tgaataataaaccagcgtgta

SEQ ID NO: 961 - DNA, 17 bp, Oreochromis niloticus
tagaagcccagtgagca

SEQ ID NO: 962 - DNA, 638 bp, Oreochromis niloticus
  misc_feature 5, 496, 585, 602, 612, 618: n = A,T,C or G
aagcnaccaccccagtgttacacagatgggataagtttctgtatgctaaaatgcaatgattgtctttttttgaacataatgattcaaagtaacacacacacacacacacacacacacacacacacacacacacacacacacacacacacacacacacacacacaaaagtagctctatttccacctcaaccattcacaaaacagtagctacctggcttgtctatatgatcaccttacaacaaacctatgcacactatttttgttcagtgttcatgccattcacctaatggatatagacattagtccatgtccttgatagtcctgatggtttccaacgttactggcatgacgagcagaacccacctgtgatgctttctacatgccacagtggagggggcgccataatggtctggggaactttttccttcagtggaacaacggagcttcaggaggtgcaggagcatcaaacggggggatcctctagagtcgacctgcangcatgcaagcttggcactggccgtcgttttacaacgtcgtgactgggaaaaccctggcgttacccaacttaatcgccttgcagcacatnccccttttcgccagctnggggtaatancgaaanaggccccgcaccgatcgcct

SEQ ID NO: 963 - DNA, 21 bp, Oreochromis niloticus
ccaccccagtgttacacagat

SEQ ID NO: 964 - DNA, 20 bp, Oreochromis niloticus
ccattaggtgaatggcatga

SEQ ID NO: 965 - DNA, 550 bp, Oreochromis niloticus
  misc_feature 462, 524, 526: n = A,T,C or G
aagagcatctggcaatgagaacgaatacaactgggctttagactgcagccagtctccatttatcagaaccaatatgtgagctgctaaagcctgagagaaccggagaacggctgaagaagtcacagagcataatgcatagagtgagatggagtgctatgcaccctgctgcgtactgagacaatcacactgtaattacacttatggcgcgtgtgagatggacctataatcacctaatcatatcgatcaaacccacacagcgctctgactcgcgcaaacagctgaaagactgaaagattttaagagatgaaagacattttcagatatgcacacacacacacacacacacacacacacacacacacacacacacatcgcgctgttttgtcagtttggtcacccattaacaaaaaaagcccagctcacagctcgtcaacgcatactgagggctatatgtgcttccgnacgcgcataccgcccacgcgcacacaagccctacacattcacaccggacgagattacaacangngccaggtcgcctgtgcgtctccac

SEQ ID NO: 966 - DNA, 20 bp, Oreochromis niloticus
acttatggcgcgtgtgagat

SEQ ID NO: 967 - DNA, 20 bp, Oreochromis niloticus
tgggtgaccaaactgacaaa

SEQ ID NO: 968 - DNA, 643 bp, Oreochromis niloticus
  misc_feature 1, 5, 6, 7, 8, 9, 11, 12, 13, 16, 21, 24, 25, 32, 33, 40,62, 497, 504, 512, 546, 559, 577, 579, 584, 585, 635, 643: n = A,T,C or G
ngggnnnnngnnnaanttctnttnnttgaagnngatcttnttggaatacccggccccttctngaggtcgacggtatcgataagcttgatatcgaattcctgcagcccccaagactggagatgctgtcagtcagagtaacagcgcatgaataattgctttcataaaactgttgcgctccagttggttcgctggcgtgtgtgtgtgtgtgtgtgtgtgtgtgtgtgtgtgagaagtggaaaaaaaaactctctaaagatcaatagggacatggcgttaaactagtttgtcattaaaacgggacagtccccagaacttaaaatcaaatttggcataagtttggcttgaagtctgaactagcttgactgaaggtttctcatgcagccgtcatgtttgtgcggtttgttagggggggatccactagttctagagcggccgccaccgcggtggagctccaattcgccctatagtgagtcgtattacgcgcgctcactggccgncgtttanaacgtcgngactgggaaaaccctgggcgttacccaacttaancgccttgcagcanatcccccttttcgccagntnggcgnnaatagcgaaaaaggccccgcaccgatcggccttcccaaacagttgcgcanccttgaan

SEQ ID NO: 969 - DNA, 17 bp, Oreochromis niloticus
tgcgctccagttggttc

SEQ ID NO: 970 - DNA, 21 bp, Oreochromis niloticus
taacgccatgtccctattgat

SEQ ID NO: 971 - DNA, 486 bp, Oreochromis niloticus
tggataagctttgttcaaataagatatatcttctgtcacattagacaaaatctaatctgacagatgatacgtgtcggtccggctcttcaagcaactaaaagcatgaagctggaatccaatctttcaaatgcagattcatttgaggcggattagagaacgagtgactcaggaagtgtgcgtgtgtgcgtgcatgccccgtgtgtgtgtgtacatgtgataaagttgtggtgtgactaagttctgacagtctgccagggctggaaacgtctgccatcgatcctaatttggcagcagatcctctgactacaataggctctccaatctgctacagtcactcttactgggtgggaccaagacacacacacacacacacacacacacacacacacacacacacacacacacacacacagagacttggcttaccaaaccagaaaggaaacagacgggacagagagaccagccttgacaaaacaacctttacac

SEQ ID NO: 972 - DNA, 20 bp, Oreochromis niloticus
cgtctgccatcgatcctaat

SEQ ID NO: 973 - DNA, 20 bp, Oreochromis niloticus
caaggctggtctctctgtcc

SEQ ID NO: 974 - DNA, 624 bp, Oreochromis niloticus
  misc_feature 19, 23, 539, 567, 619: n = A,T,C or G
ttgaatcccttgcatcccncggnggcggccgctctagaactagtggatcccccccccttgaggaaaattatttgcccacaactgctctaatggattcagacgtcatcctcagctttcatctgttacgttgacttttgtcgtgtggcattttctatatatatttccacttcataaaattctgcgttactacccctgtccaccaggctgtgctgtttcactttgtcgtcacaacaacaacaacctgctgattgctgtgctcaacagtcatgcgcaccttaatggatgtatcgaacaagcgtttaatacccaactgtttgtgtgtgtgtgtgtgtgtgtgtcagggggatgtgtaagcagctccgtttcagagtgaaaggaaaatggatggaaatgatatactctgttcttaattctgtctttttaatgataaagctggtttctttgattttagccaactggttcagaatggtcagtacggacttgagactgaggtgggctgcaggaattcgatatcaagcttatcgataccgtcgacctcnagggggggcccggtacccagctttttgntcccttttgtgagggttaattgcccccttggcgtaatcatggccatagctgnttccc

SEQ ID NO: 975 - DNA, 18 bp, Oreochromis niloticus
gcgttactacccctgtcc

SEQ ID NO: 976 - DNA, 21 bp, Oreochromis niloticus
ttggctaaaatcaaagaaacc

SEQ ID NO: 977 - DNA, 486 bp, Oreochromis niloticus; identical to SEQ ID NO: 971

SEQ ID NO: 978 - DNA, 20 bp, Oreochromis niloticus
cgtctgccatcgatcctaat

SEQ ID NO: 979 - DNA, 20 bp, Oreochromis niloticus
caaggctggtctctctgtcc

SEQ ID NO: 980 - DNA, 465 bp, Oreochromis niloticus
  misc_feature 1, 3, 6, 7, 9, 12, 16, 19, 29, 43, 45: n = A,T,C or G
ntngcnnanctnacgnaancaccccactntttaggaaccccancngacttcaccgtgtgctggtgtttgtgtgcacatgatcttccacaattgaaatgcttgcacgtatgtgtataaatagaaaatgtcgaaatgtgatgtctctgtgagtgtgtgcttctgatgcggcagtgtgcatgtgtgagcttgttctctggctcatttgcatatctacgtctcatcacgttgccaagacaacctcatctgttcatctgggagggcaggaaataaagcgatggtgcaaacacagtgaaagagagacatgcgcaacacacacacacacacacacacacacacataaatacagacacacacacaaatgcatgcatacaggttcatttaataacagcgcttacaaatgaattatttccattggtagagatttaataagttacttggttttcacggacctcagagataaattgg

SEQ ID NO: 981 - DNA, 20 bp, Oreochromis niloticus
atctgggagggcaggaaata

SEQ ID NO: 982 - DNA, 20 bp, Oreochromis niloticus
ctctgaggtccgtgaaaacc

SEQ ID NO: 983 - DNA, 786 bp, Oreochromis niloticus
  misc_feature 2, 3, 4, 6, 10, 26, 655, 665, 680, 683, 709, 730, 732, 735,740, 777, 784: n = A,T,C or G
tnnntnttgnctttgaagcccttccnggccccctcgaggtcgacggtatcgataagcttgatatcgaattcctgcagcccccacgtggctaatcgaagaacagtcctatttgatattggaaagaatagactgatctaaaactgggacaaacactagcacagaaaaaaatgagcacctatacatcagtgtgtcaatggaacagagtttcgactgcacaaaaacaaaacaactgaagcaacaaagaaataaccagtgatcaccagtgtgatctgcaatagtgggctaactgacggagtaaagggggcgttaaagacagaaaatggacacagcagcagcaacaaaacgcttctaaaatcagatcagaggtagaagaaaaacccttttactctgctgatgattacatcaaagtgattatgagaatatgtgaggagcacatttgagacggtcctaatcaaccgcgcagattaggacgataataggaaaaacaagtaaagaggtggaaagggtgagaggaaaattagagttttgttaaagtaatacacacacacacacacacacacacacacacacacacacacacacacgcacacacacacacacacacacacacttttcaaccaccgccgttggggagtctaccactttatctggttgncaaacaaatnggttgacttatgganaanttctgagcctggggaattttgttcgngccccttaatttgatgggggncnccnaaaantttttggcagcttttattaacatttcgcttgcttaanggggccncg

SEQ ID NO: 984 - DNA, 20 bp, Oreochromis niloticus
caagtaaagaggtggaaagg

SEQ ID NO: 985 - DNA, 21 bp, Oreochromis niloticus
agcaagcgaaatgtaataaaa

SEQ ID NO: 986 - DNA, 754 bp, Oreochromis niloticus
  misc_feature 3, 4, 5, 8, 9, 10, 12, 15, 32, 40, 48, 51, 53, 60, 101,435, 496, 498, 513, 515, 531, 539, 556, 557, 562, 564, 571, 572, 574, 576, 593, 609, 610, 616, 617, 623, 624, 625, 640,641, 645, 658, 670, 671, 672, 674, 675, 678, 702, 703: n = A,T,C or G
  misc_feature 739, 742: n = A,T,C or G
ttnnnttnnntnctnagtagattctcttggangggccccntccttttnggntnacggtanccgataagcttgatatcgaattcctgcagcccactgtaggntgcattaacagccacagatgtcaggtatcccggtccagacacggtcgtcagcagttcagctataaaccagccatacacattccttccttccctgtctcccaccagctgagcatttctctcacacacacacacacacacacacacacacacacacacacacacacacacacacacggggacaggctagaattaaaactccagggttgtccaatgagaaaccttcatgattggacatcagtagaggcagaaattcaaactgtgaaccaatcagattgtgtgtcccgtttgcttcccccttcaacaccttattagggcgaccttccatgtctctcanattttccggtcttgttggggttggcaccccgggtaaaaggaatggtcaatcaagccacttntngggggggaatcccancnttggtttcttaagganaccggggnccgggccaaaaccgggnnggggntnggggaanncntntccaaaaattttcgggncccctttatttaaggnngggaanntttccnnnaatttttaacccgcnnggcnggccttttaaacntgggggccccgnnntnnggntttttttaaccaaaaccggtttcnnttggaacctttggggggaaaaaaaaaccccccttgnggncggttttaaccc

SEQ ID NO: 987 - DNA, 18 bp, Oreochromis niloticus
ggtccagacacggtcgtc

SEQ ID NO: 988 - DNA, 21 bp, Oreochromis niloticus
atggaaggtcgccctaataag

SEQ ID NO: 989 - DNA, 329 bp, Oreochromis niloticus
agggtggctattaacaaggcaatctaagcttgaacttcaactaaacacatgcatttttctgctatacgtgtgtgtgtgtgtgtgtgtgtgtgtgtgtgtgtgtgtgtgtgtgtgtgtgtgtgtgaggctgaagagcttttttttaacccacatagctgctctctttcagatcctgtactgattacacgtcaccattctgtgacctaacactgattgccttaatcttgctttaacatcagatttaacagtataaccatagaaaataggactaggacataggactaactgttcaaacccttatttttccccctcctccagcgctcggaagc

SEQ ID NO: 990 - DNA, 22 bp, Oreochromis niloticus
ggtggctattaacaaggcaatc

SEQ ID NO: 991 - DNA, 20 bp, Oreochromis niloticus
ggtcacagaatggtgacgtg

SEQ ID NO: 992 - DNA, 791 bp, Oreochromis niloticus
  misc_feature 1, 10, 12, 13, 19, 23, 28, 44, 517, 593, 632, 667, 670,689, 697, 708, 711, 712, 713, 734, 735, 752, 764, 774: n = A,T,C or G
nttcttcctnanngagctncttngaaanttcccctcgaggtttngggtatcgatccgcttgatatcgaattcctgcagcccaaaaataggatttagaatagcaaactttataaactttctgtaataatatgtatatttttttaagtaaaatacactgtggcttctaatttggcacaaatagaatgtttgctttgttgagaaaggtcaaacacacagacacacacacacacacacacacacacacacacacacacacacacacacacacacgtacaaaagacattgtgatttgtgtatcaactgcaaggcaacctgctgctgcccccaaattactctgtggcaggtgtaaaaaatttgccctgtgagagcactacacacaggttgattgcacacctgctttgctattttacaggtgctgtttgtgctagcgaagactgcggctccctcccgaggcacccccacacccacccagtttcacgccaataagtcctgtgcctgccagcatgacagaaacctnatcatgctaatccaaatgctaactgaatcagccatagaactgcattggtttctgctgttttgcttgcactgacaanggttctagcttatcattttgcccttgcctgaaatgggantgaataattaaagcagttgggttaaaatattgaanttnggggggggatccacttagnttttagancggccgccacnggnnntggagctccaatttcgccctnnaggggagttcgttttangcgcgctaatgntcgtcgtttnacaacgttgtgacctgg

SEQ ID NO: 993 - DNA, 21 bp, Oreochromis niloticus
gtaaaatacactgtggcttct

SEQ ID NO: 994 - DNA, 19 bp, Oreochromis niloticus
agcacctgtaaaatagcaa

SEQ ID NO: 995 - DNA, 569 bp, Oreochromis niloticus
  misc_feature 8, 9, 533, 534, 543, 550, 552, 553, 568, 569: n = A,T,C or G
tgcattcnnttgctccccgcggtggcggccgctctagaactagtggatcccccccctctctctctggggcaagagtccctcacatgaaagcagaaaagccacacgtgcgcgcgcgcacacacacacacacacacacacacacacacacacacacacacacacacacacaccaccctttaaccctctcattagtgtaatcctgcatgagaacagtaaattgtcatgaataaatccacttagaagtcagcgaatgaaagactttcactttgagttggttgcattaccatttcaataagcgtgccacgctgcaaaacgttggcagtgtttgacagagtaattgggaacattaacgagtagataaaatgtggtaagcggagggaggcgtccgtgtaagtgggctgcaggaattcgatatcaagcttatcgataccgtcgacctcgagggggggcccggtacccagcttttggttcctttagtgaggggttaattgcccgcttggcggtaatcattggcatagctggtttcctggggnnaaatggtantccggtnannaattccccacaaaann

SEQ ID NO: 996 - DNA, 21 bp, Oreochromis niloticus
gtccctcacatgaaagcagaa

SEQ ID NO: 997 - DNA, 18 bp, Oreochromis niloticus
cctccctccgcttaccac

SEQ ID NO: 998 - DNA, 163 bp, Oreochromis niloticus
caagcagctactcatgtgagaccacactgactcaatggttgcttatgtcttctgtgtgtgtgtgtgtgtgtgtgtgtgtgtgtgtgtgtgtgtgtgtgtgtctgttgaaagtctcccacacactcccttgtctttgcatagaccagaggttcccaaagtgtgg

SEQ ID NO: 999 - DNA, 20 bp, Oreochromis niloticus
gcagctactcatgtgagacc

SEQ ID NO: 1000 - DNA, 20 bp, Oreochromis niloticus
tgggaacctctggtctatgc

SEQ ID NO: 1001 - DNA, 789 bp, Oreochromis niloticus; identical to SEQ ID NO: 341
  misc_feature 2, 3, 4, 5, 16, 19, 25, 33, 40, 653, 662, 665, 667, 683,705, 712, 736, 740, 773: n = A,T,C or G

SEQ ID NO: 1002 - DNA, 21 bp, Oreochromis niloticus
gctcgtcctatctttagaaca

SEQ ID NO: 1003 - DNA, 16 bp, Oreochromis niloticus
aaaccagcccgctatt

SEQ ID NO: 1004 - DNA, 267 bp, Oreochromis niloticus
cacagcaacctgagacgagcgggtctcatcagccaaatcccactgagcaaacaagacacgatctcgcttttctgctgagaacaatctgacctgcatgaaatgtgatcagctggagattcaccgcagtactgcagtgctgcaacacacacacacacacacacacacacacacacacacacactaaccctgacatttttaacacttagtgcgttacttcaagctcattttaaatcatgaacttaacgagttaccttacggcgggcgggg

SEQ ID NO: 1005 - DNA, 20 bp, Oreochromis niloticus
acacgatctcgcttttctgc

SEQ ID NO: 1006 - DNA, 19 bp, Oreochromis niloticus
ccgccgtaaggtaactcgt

SEQ ID NO: 1007 - DNA, 510 bp, Oreochromis niloticus
  misc_feature 294: n = A,T,C or G
gtgatggagatgttggtgttttgtacggagcagatgtactcgccgctgtcgttgtggctgacatcggacagcttgagggtcccgttggtcagaatggagatacgaggatacagcagagggtccgacagcagagcacctgtgtcctcccggtccctgcaggcaacacacacacacacacacacacacacacacacacacacacacacacacacacacacacacacacacacacacacacacacacagagcagagatattgatcgttacatatgccaatcggctctgtgtctccanaatcattgcagacttattctaacatcagattgcagaataagatcccaggaactggatcaatggaagtgtgtatcctcgccgatcggtgacttgataacagacacaaagggatcaataaatgatgagagagcagaaagaacagctgtaatttctaaggggggatcctctagagtcgacctgcaggcatgcaagcttggcactggcccgtcgttttac

SEQ ID NO: 1008 - DNA, 20 bp, Oreochromis niloticus
ccgttggtcagaatggagat

SEQ ID NO: 1009 - DNA, 20 bp, Oreochromis niloticus
ccgattggcatatgtaacga

SEQ ID NO: 1010 - DNA, 606 bp, Oreochromis niloticus
  misc_feature 2, 3, 5, 15, 17, 19, 28, 33, 578: n = A,T,C or G
tnntnttttgacaantnanctcttgganacccngccccctctcgaggtcgacggtatcgataagcttgatatcgaattcctgcagccccctcatcccattccttgctttgtgattctaagccccgcccacaatagtttttacctgtgtttaactatttttagacgtgtgtgtgtgtgtgtgtgtgtgtgtgtgtgtgtgtgtgtgtgtgtgtcagattgtctcctttagtgtttcttaggtttgaattgtccaataatctcagcttttgctgcctttgtgacctttttttgtttcctctcttcagcttgatgtaacaattttagttaactgaaaatgatctggttttctgatgtgcttacaaaataaaaattaaaaatatacattacttaaaactaaaagtagggaatatcttttttttaattaggtaaaatttgtcaaaatatccagcctgaagagactttgatgcaaatgtttattggaaagtgggatgcctgcatcactgtaagtcaggtgggggggatccacctagttctagagcggccgccacccgcggtggagctccaattcgcctataggngagtcgtattaccccgctcactggcccc

SEQ ID NO: 1011 - DNA, 17 bp, Oreochromis niloticus
agccccgcccacaatag

SEQ ID NO: 1012 - DNA, 21 bp, Oreochromis niloticus
aaaggtcacaaaggcagcaaa

SEQ ID NO: 1013 - DNA, 345 bp, Oreochromis niloticus; identical to SEQ ID NO: 342

SEQ ID NO: 1014 - DNA, 22 bp, Oreochromis niloticus
cacagccaggagacaaatagaa

SEQ ID NO: 1015 - DNA, 21 bp, Oreochromis niloticus
tgactgtcctgttttgcactg

SEQ ID NO: 1016 - DNA, 20 bp, Oreochromis niloticus
caacaggattatggaacagg

SEQ ID NO: 1017 - DNA, 20 bp, Oreochromis niloticus
gtatgcggattgcatgtttg

SEQ ID NO: 1018 - DNA, 351 bp, Oreochromis niloticus
atctgttgtctgtgacatccattttgcaatgtggcgccagccaaaatgctaaactgtttcctaataattcttatcctgacactgatttctttttttaaatattgcttaataatataaaaaaaatacacccacacacacacacacacacacacacactgtcctcagcacatatgttatctgacatggactgctgtcccggcatgggacagcagtctagttaataagtataaaccccatccatccaacaaacataattcagatcccatgatgtatttattacacacagccatagacctttcccctgaattatttccaccagtcactgaattaaagatcatataggcatgagga

SEQ ID NO: 1019 - DNA, 21 bp, Oreochromis niloticus
tgtctgtgacatccattttgc

SEQ ID NO: 1020 - DNA, 20 bp, Oreochromis niloticus
ggacagcagtccatgtcaga

SEQ ID NO: 1021 - DNA, 287 bp, Oreochromis niloticus
cccattaatagctctttgtgtattggtgtgtacttgtatgttgtgcatgtgtttgcgtgtgcatgcatgtgggttctgacatggattggagcagctaatcacaccattaatcacagcgcaggaccaaagtgacacttttcgtctccccacacctccagtgtttttccttttaatgctcactgtaatgggaacacacacacacacacacacacacacacacacacacctacataagacttgtaccagagcaagtgccttagactgcaggcttatttttcttgagttgg

SEQ ID NO: 1022 - DNA, 20 bp, Oreochromis niloticus
ttctgacatggattggagca

SEQ ID NO: 1023 - DNA, 20 bp, Oreochromis niloticus
agcctgcagtctaaggcact

SEQ ID NO: 1024 - DNA, 608 bp, Oreochromis niloticus
  misc_feature 1, 3, 7, 12, 13, 14, 17, 18, 19, 20, 26, 29, 32, 90, 501,579: n = A,T,C or G
ntnttgntcctnnngannnntttggnatnccngccccctttcgaggtcgacggtatcgataagcttgatatcgaattcctgcagcccccngcagacagcagcagctggagtgggacgactccaccctcacctactaaacacacacaagacacccaaacaagagctcccgacacacacatcagaaactcactcatactccctccctcacacacacacacacacacacacacacacacacacacacacacactctctctctcacacatgcagcactccctgcagtttcatgtctaggagccatgatgtaaaaacttaacaaaaataaaataaaaaaaatcaagaaaaggagaaacataaagtcccttcagcgtatatatggtcaaggttttcctgttgttatcttaagtggtggtccatatagaattcagcatttccatgctggggaaataggttttgcagctgtttgagctaagattttcaagttattcacaaaatgaaganccataatgtgtgtcaggcgaagaactccattcaaatggcatgtaatagccagaaaccgcactgtttcgccgaaatatngcgattttacccaggtccttaaggccggt

SEQ ID NO: 1025 - DNA, 20 bp, Oreochromis niloticus
actccaccctcacctactaa

SEQ ID NO: 1026 - DNA, 21 bp, Oreochromis niloticus
agggactttatgtttctcctt

SEQ ID NO: 1027 - DNA, 441 bp, Oreochromis niloticus; identical to SEQ ID NO: 343
  misc_feature 285: n = A,T,C or G

SEQ ID NO: 1028 - DNA, 20 bp, Oreochromis niloticus
cgtgactcattaggcattcg

SEQ ID NO: 1029 - DNA, 20 bp, Oreochromis niloticus
ttttcctcccctttctccat

SEQ ID NO: 1030 - DNA, 783 bp, Oreochromis niloticus
  misc_feature 26, 34, 628, 632, 642, 747, 760, 776, 779: n = A,T,C or G
gactttgattgcctttgaccgcggcngcggccgntctagaactagtggatcccccacaagagaggagtccagtgggcgtggctgagctggtttgctctgtggtggagatgaaccttcatgacaaagcatgccagtcccagtcatcctccacagctgggagcgcttccctggctcctgcacaataatccatgtatacagaatgattatactttttatcattttcctttcttttttttcccctctctctctctctctcacacacacacacacacacacacacacacacacacacacacacacacacacagaggaaaagataatggcaacaggttttctgatcagcctgacacatgcccaaaaaaccttttttgtttcaaaataaaacttgagttgatggcaagttttgctgctgggttgctactttcatctgcacacagatgaatgcgttaacaaaattccaggtagtattcaaagtgtggtattagcaaattgaccatttttgggctgcaggaattcgatatcaagcttatcgataccgtcgacctcgagggggggccggtacccagcttttggtcctttagtgagggttaattgcgcccttggccgtaatcatgggcatagctggttnctgngtgaaattgntattccgtcacaattccacacaacatacgagccggaagcataaaggggtaaagcctggggtggctaaagagggggcttacctaacataatttgcggtggcgcttnatgggccggtttncagtcgggaaacctgncgnggcc

SEQ ID NO: 1031 - DNA, 17 bp, Oreochromis niloticus
ccagtcccagtcatcct

SEQ ID NO: 1032 - DNA, 21 bp, Oreochromis niloticus
agaaaacctgttgccattatc

SEQ ID NO: 1033 - DNA, 605 bp, Oreochromis niloticus
  misc_feature 2, 3, 7, 14, 16, 20, 25, 33, 44, 82, 111, 472, 480, 509,511, 520, 521, 541, 548, 563, 576, 588, 604, 605: n = A,T,C or G
tnnagancctcttngnaaancccgnggtgtttnggcgatctacncctagtggatcccccaaaaatctagggcaccccatttnacactctgtgcttttatcaagtgcataangggataaacaacaacagcaagtttgccaactctccattaaagttgtgattttagtgtgcttttgggtttgctctctctctctctctctctctctctctctctctctctctctcacacacacacacacacacacacacacacacacacacacacacacacagagtgtagaaatgagtgactgctgcactgtttttgttgttttttaccataagccttttagctttgactttatcctgccacttgtagagctgtgaaagtggctgaagagacaaaaatctatctctcaggtctgagggatcttacggtctttggaaaatattgatcagcagaactgacttggagttaaaaaactgctctgtangaaagcancaaggacatttgtatccagtgggctgcangnaattcgganntcaagctttatcgataccgncgacctngagggggggcccggnacccaactttgtnccctttagaganggttaattgcgcgctnn

SEQ ID NO: 1034 - DNA, 20 bp, Oreochromis niloticus
attttagtgtgcttttgggt

SEQ ID NO: 1035 - DNA, 19 bp, Oreochromis niloticus
aaaaacagtgcagcagtca

SEQ ID NO: 1036 - DNA, 618 bp, Oreochromis niloticus
  misc_feature 8, 16, 546, 551, 618: n = A,T,C or G
tttgactnccttgggnaccgcgccccccctcgaggtcgacggtatcgataagcttgatatcgaattcctgcagccccccttggggctagctagattgcttgactgctagctagcacaaagcagtgctagcttagtgaggatgttttacttcctgctctttatctcctcacctgtgttcatatatggtaaaagctaatccatatagaggggtgaggggagatgaccctttgtgatcagcaggaagtcacacaaacgcacccccattcacacacactcactcactcacgtgcacgcacacacacacacacacacacacacacacacacacagtgttttaaccttttgtgaccatatgggtgttacaatgtgtggcgcttgtattcttagaataaaaggctgtttattggaaggtggctaggagacaggtgaggagcattcagctccagtagctttggttccggggggggatccactagttctagagcggccgccaccggcggtggagctccaattcgccctatagtgaggtcgtattacgcgcgctcntgggnccgtcgtttacaaccgtcgtgactgggaaaaccctgggcgttacccaacttaatcgccttgcacacn

SEQ ID NO: 1037 - DNA, 21 bp, Oreochromis niloticus
tatagaggggtgaggggagat

SEQ ID NO: 1038 - DNA, 20 bp, Oreochromis niloticus
agaatacaagcgccacacat

SEQ ID NO: 1039 - DNA, 430 bp, Oreochromis niloticus
gacgtgatttccatacaaattactgttgtcatggtaactggttgaaagaggtcattacctaggtgatattggtgacaaatgatgaaaggctggcactggaccaagtgctcttcaacaaaggacaagtggctttcacagaggtgtgtgtgtgtgtgtgtgtgtgtgtgttacacatgcagagagtgtcaatcagctagacaggagcatgcacagccacaagcaagtaatctgctgtagacttccatcataggcgagtttaggcgagtgctcaagcgcctctaaatttcatcacagcacctctaaaaacaactgtagtgatggtaataatgatgatgtatttcagtattatcttctgatattgtcctctaatgttctattttggaggatgaaaactgcccagtgttgttgatgtggtgatgttgcagtgcgc

SEQ ID NO: 1040 - DNA, 16 bp, Oreochromis niloticus
aaaggctggcactgga

SEQ ID NO: 1041 - DNA, 21 bp, Oreochromis niloticus
ctaaactcgcctatgatggaa

SEQ ID NO: 1042 - DNA, 223 bp, Oreochromis niloticus
  misc_feature 138, 164, 185, 192, 204, 211: n = A,T,C or G
gctgtccagctgtgtttcccttgtgagattaattgccgagatagtgtgtgtgttttgcctgtgtgtgtgtgtgtgtgtgtgtgttttgcctgtgtgtgtgtgtgtgtgtgtgtgtgtgtgtgtgtgtgtgtgtgtgtnccttgcaggtgagtttccaggttagngcacacactgtgcttgtgtangatatgngatattgctgangaagcantaaaaagagtgc

SEQ ID NO: 1043 - DNA, 21 bp, Oreochromis niloticus
agctgtgtttcccttgtgaga

SEQ ID NO: 1044 - DNA, 20 bp, Oreochromis niloticus
acctggaaactcacctgcaa

SEQ ID NO: 1045 - DNA, 811 bp, Oreochromis niloticus
  misc_feature 6, 7, 8, 15, 30, 37, 44, 599, 626, 627, 655, 662, 667, 687,689, 703, 722, 723, 726, 738, 744, 761, 765, 777, 786, 791, 795, 796, 799, 803, 807: n = A,T,C or G
tggtannnccctctngaatgctctttggangcggccncggccgntctagaactagtggatcccccccaggacggacgaggtgctggcgaagtcctgccttagacctgggggagcgagatatgaggaccagcgtgcaaaacacccaccacacacacacacacacacacacacacacacacacacacacagacagtcatcacctcctggggttaatgaagctgaagtagcgatgggctctgagatctggtgccatatgttaaattattaggacgggggggacagtagggacagacagacggacagcaagagaagtcagttggctcaaatgacagagataaccataaaaaaaagtgactaaacagcaagaatgatttccactgtcctgaaatcatttcagaaacatctctctctgtataaagattcagatttatagtgcattctaagcactctggcaggaggagcaaacaactaaccaacagtctacaactcaaatcaaaaatcatgaagtgcagtcagggtgcagatggaggtcctgctacttactctcctcctgcagccggggggctgcaggaattcgatatcaagcttatcggttccgncgaccttgaaggggggcccggtcccanntttggtcctttagggagggttaaatgcnccttggngtaancatggcatagctgtttccgngngaaaatgttttccngctcatttcccccaaaatnntanccggagcttttntaaagncgggggggcctaaaggngggngcttacccccanttaattggnggtgngccnntgncccntttnacct

SEQ ID NO: 1046 - DNA, 19 bp, Oreochromis niloticus
ggggagcgagatatgagga

SEQ ID NO: 1047 - DNA, 21 bp, Oreochromis niloticus
ctgccagagtgcttagaatgc

SEQ ID NO: 1048 - DNA, 436 bp, Oreochromis niloticus
ccccagggtgccgagcgctaacactgctgacctctagagcaggtcaccatgacagcgtgtgtgtgtatgtgcatttgatcttgttgtttggagcacaactgtacacgcgccttcacgcaataactcatctgcctgccctggagaacagagtggtcctgctatttctgctcagagtcattatcatcaccgttacctcctctgtgactgccccctttaactccacaccgcccaagaatctctctctctcacacacacacacacacacacacacacacacacacacacacacacacacacacacacacacactgtcctgcaggtcagagccaagtccaagaggcatgggcttcattggcaggcagtgtgaataacaggaattgcagggaatactaagtccaaaacgggctgcacttttacactattgatagaacatggg

SEQ ID NO: 1049 - DNA, 20 bp, Oreochromis niloticus
ccctggagaacagagtggtc

SEQ ID NO: 1050 - DNA, 20 bp, Oreochromis niloticus
cttggacttggctctgacct

SEQ ID NO: 1051 - DNA, 634 bp, Oreochromis niloticus
  misc_feature 3, 5, 7, 12, 13, 14, 22, 23, 35, 634: n = A,T,C or G
ggngntnggttnnnttgtgttnngatagtgatctnttggaacccccccccttcgaggtcgacggtatcgataagcttgatatcgaattcctgcagcccccaatccatgactgacagtgacagactgactctgtcttctctgcctgtgtctgttgtttttgtcctctgcaacaggacaaactctctctctccatcacacacacacacacacacacacacacacacacacacacacacacacacacacacacacacacacacacacacacacgcacaattctgccactcatgtctcacaacttcaaaagaagcaaatgagacaacaaattattcagaaaagcgtttgctctggtgataattttctatcaaaccaggcttgtttttgcaaatagattgcaaacagagtctgctgggggggatccactagttctagagcggccgccaccgcggtggagctccaattcgccctatagtgagtcgtattacgcgcgctcactggccgtcgttttacaacgtcgtgactgggaaaaccctgggcgttacccaacttaatcgccttgcagcacatccccctttcgccagctgggcgtaatagcgaagaggcccgcaccgatcgcccttccaacagttgcgcn

SEQ ID NO: 1052 - DNA, 20 bp, Oreochromis niloticus
tctctgcctgtgtctgttgt

SEQ ID NO: 1053 - DNA, 21 bp, Oreochromis niloticus
gagcaaacgcttttctgaata

SEQ ID NO: 1054 - DNA, 380 bp, Oreochromis niloticus
ctgtggtgcatttgtgtttgggtgagtctgaggggtgactgcttaagtaaaatatggtccaccctttctctcgaatttaacgtgctccacctgtggaatgatgaggaaatttctcaaattattaccaaaccttttctgaagtgtgtgtgtgtgtgtgtgtgtgtgtgtgtgtgtgtgtgtgtgtgtgtgtgtgtgtgttaatttatgagaatgtaaaaaaacccaaccagggggagcacaagccaacatgctcctgatgctgatcccaaacatggataagatggggaaggttacatcaggaagggcatccggcacaaaacctttgccaaatcaaacatgcgggtcatcaagaatgagatttttcagaactaatcagtcag

SEQ ID NO: 1055 - DNA, 20 bp, Oreochromis niloticus
tccacctgtggaatgatgag

SEQ ID NO: 1056 - DNA, 20 bp, Oreochromis niloticus
catgtttgggatcagcatca

SEQ ID NO: 1057 - DNA, 609 bp, Oreochromis niloticus
  misc_feature 2, 5, 8, 13, 21, 22, 27, 32, 36, 44, 70, 72, 93, 121, 139,151, 224, 443, 448, 451, 462, 468, 522, 530, 544, 555, 566, 574, 578, 591, 594, 608, 609: n = A,T,C or G
tnatnttnaacangaaaagcnnaaaangactncccncgaactgnggaaaacccccaggggatcccccccngngagtgatggcgtccccttttnccacttcctcccacagcatcctgggggntcctccctccctgctggngccccccacggnggccatcactctcctccacgctgaggtcacacacctctgatcccactcacactcacgcagattcacacacagnctctcacacacacacacacacacacacacacacacacacacacacacacacacacttttattcacacacactcactcacacacactcctattcacacacacactggtcatgaaaggaagtctctcagtaaatttagataaaaaacgatttgagctttgagtttgtggtaaaaagagaaactctgaggatgtgcagagacccagtgagctgaaggctcgnatggncgngatgtcgcggngcgacnccgtcaccctgtaagggggctgcaggaattcgatatcaagcttatcgataccgncgacctcnagggggggcccggnacccagctttnggtccctttantgaggggnaatngcgcgcttggcgnaancatggcatagctgnn

SEQ ID NO: 1058 - DNA, 21 bp, Oreochromis niloticus
catccttcatcatcctccctc

SEQ ID NO: 1059 - DNA, 20 bp, Oreochromis niloticus
ccttcagctcactgggtctc

SEQ ID NO: 1060 - DNA, 132 bp, Oreochromis niloticus
ccccacttgggtttgagcttggagtagtgcacacacaccacacacacacacacacacacacacacacacacacacacacagtcagctgaatgcactttatcttttctgatcaatggtgcgggattacagagg

SEQ ID NO: 1061 - DNA, 20 bp, Oreochromis niloticus
acttgggtttgagcttggag

SEQ ID NO: 1062 - DNA, 20 bp, Oreochromis niloticus
ctctgtaatcccgcaccatt

SEQ ID NO: 1063 - DNA, 813 bp, Oreochromis niloticus
  misc_feature 9, 12, 592, 608, 673, 714, 728, 738, 759, 761, 763, 790,796, 809, 813: n = A,T,C or G
ttgcttgtnaanccctttggaagcccccctcgaggtcgacggtatcgataagcttgatatcgaattcctgcagccccctgctgtgcccacgtggagcctcaacgctcatttcacaacacggactcagcggggatgcaaatgtgacgtcgtgcagccaaactttcatcatgtgacgttttcacacccgaaatctgctacacacacacacacacacacacacacacacactcacagactcactcactcacacacacacacacacacacactcacagactcactcactcacacacacacacacacactgctggcacgctgctcggctgcgtcgggggagaagcggcggacggacgggtcacccagctcggttggcagctcagctccgggggggatccactagttctagagcggccgccaccgcggtggagctccaattcgccctatagtgagtcgtattacgcgcgctcactggccgtcgttttacaacgtcgtgactgggaaaaccctggcgttacccaacttaatcgccttgcagcacatccccctttcgccagctggcgtaatagcgaagaggcccgcaccgatcggccttncaacagtttgcgcagnctgaatggcgaatggaaattgtaagcgttaatattttggtaaaattcggcgttaaatttttggtnaaatcagctcattttttaaaccaataggccgaaaattgggnaaaatccctttttnaattcaaagnaattgaccgagatagggttgnantngttgttccaagttttggaacaaagagntccctntttaaggaacggnggcn

SEQ ID NO: 1064 - DNA, 21 bp, Oreochromis niloticus
tcgtgcagccaaactttcatc

SEQ ID NO: 1065 - DNA, 16 bp, Oreochromis niloticus
cgacgcagccgagcag

SEQ ID NO: 1066 - DNA, 654 bp, Oreochromis niloticus
  misc_feature 4, 12, 13, 23, 29, 467, 477, 478, 491, 542, 564, 572, 585,592, 602, 605, 621, 637, 646, 651: n = A,T,C or G
tttnatcccttnnattggccccncccttnaggtcgacggtctcgataagcttgatatcgaattcctgcagcccccggattgtgacaaggagccagaactcacaggatcgacatagatccagcctgctctgtccatctgctccaagcttcattcccagcatatcaataccccatgtcacacacacacacacacacacacacacacacacacacacacacacacacacacacacacagagcactctgtcacctgcgacttctcctggtcccatcactctcccaccactccagcccttggctgcaaagcctgcttatgtttcatcctgacacttagagaaaatccttgcttgtctataagcgcattcagcaccacacaaagggaacggggggggatccactagttctagagcggccgccaccgcggtggagctccaattcgccctatagtgagtcgtattacgcgcgctnactggccgtnngtttacaaccgtngtgactgggaaaaccctggcgttacccaacttaatcgccttgcagcacatncccccttttcgccagcttggcntaaataanccgaaagaggccngcaaccngatcggcccnttnccaaacagttgcgcanccctgaatggcgaatnggaaattgntaggngtt

SEQ ID NO: 1067 - DNA, 21 bp, Oreochromis niloticus
attgtgacaaggagccagaac

SEQ ID NO: 1068 - DNA, 20 bp, Oreochromis niloticus
aagtcgcaggtgacagagtg

SEQ ID NO: 1069 - DNA, 598 bp, Oreochromis niloticus
  misc_feature 6, 9, 11, 14, 32, 34, 36, 37, 44, 47, 52, 54, 60, 554, 581: n = A,T,C or G
ggaggnggntnttngttcaaggagggaattanantnnacactcnttngtttngnataganctagtggatcccccgctcggcatctcccagcctcgtgcacagaaaaacacacatgcatgtttcagtaaataagggacctctatcgtcgcaggtagactgaaggcgcacgcacacctgctcatctaatgagagcactatcacctggactctcctgcctcaattagcctctgttcctccttcagcgagaaacacacacacacacacacacacacacacacacacacacacacacacagaaagaccgagtcactcaggtttatagtatacacacaatacacttctgtccccaagaggacttcgccactctacgctctcctgcacagtgcagcactcagctctttagcagcattaaatcaacagggggctgcaggaattcgatatcaagcttatcgataccgtcgacctcgagggggggcccggtacccagcttttgttccctttagtgagggttaattgcgcgcttggcgtaatcatggtcataagctggttcctgngtgaaaattgttatccgctcacaattncacacaacatacgagcc

SEQ ID NO: 1070 - DNA, 19 bp, Oreochromis niloticus
gtcgcaggtagactgaagg

SEQ ID NO: 1071 - DNA, 21 bp, Oreochromis niloticus
tcttggggacagaagtgtatt

SEQ ID NO: 1072 - DNA, 653 bp, Oreochromis niloticus
  misc_feature 33, 596, 624: n = A,T,C or G
tttgatgcctttggaaccaccgcggtggtttgncgctctagacctagtggatcccccccatggacaccagaacaggaaagtgatgaacacacacacacatctacacacacactgactcagcatgaagtgatacacacacatgaacacatgtgaactcgttgactgagtgagaaatgacacacacacctacaccgaaatggtgattcattgagaagtgatccacacacaaaatacacatgcagacgctcgtgcaatgaagagtaatgcacacacacatgctcgtgcaatgaagaatgctttgctaacaaatgcttatgctgatatgcaaaatgctgcatacacacacacacacacacacacacacacacacagactctgttacaagaagccattgattacacagaacgcattttatgtcatccagagggcacattatgtgggctgcaggaattcgatatcaagcttatcgataccgtcgacctcgagggggggccccggtacccagctttttgttcccttttagtggaggggttaattgcgcgcttgggcgtaatcatggtcataagctgtttcccttgggtgaaaattggttattnccgcttcacaatttccacacaacatacngagcccggaagcatttaaaaggtgtaaaa

SEQ ID NO: 1073 - DNA, 21 bp, Oreochromis niloticus
ctcgtgcaatgaagagtaatg

SEQ ID NO: 1074 - DNA, 20 bp, Oreochromis niloticus
gcgttctgtgtaatcaatgg

SEQ ID NO: 1075 - DNA, 284 bp, Oreochromis niloticus; identical to SEQ ID NO: 345

SEQ ID NO: 1076 - DNA, 21 bp, Oreochromis niloticus
cagcatgttgtctggatcttg

SEQ ID NO: 1077 - DNA, 22 bp, Oreochromis niloticus
tttgttgctgtggtctgttctt

SEQ ID NO: 1078 - DNA, 278 bp, Oreochromis niloticus; identical to SEQ ID NO: 370
  misc_feature 69: n = A,T,C or G

SEQ ID NO: 1079 - DNA, 20 bp, Oreochromis niloticus
aaagccaacggtctgaattg

SEQ ID NO: 1080 - DNA, 19 bp, Oreochromis niloticus
agcagaggacacccctcat

SEQ ID NO: 1081 - DNA, 613 bp, Oreochromis niloticus
  misc_feature 3, 24, 27, 33, 49, 73, 360, 574, 597, 612: n = A,T,C or G
atnttgtaacatgaaaagatttanaangaactnccccgcgtacttgggnaaaaacccccaggggatccccccnggagtcagttactgcacagttttttggcaagttgagaggctactgttaaacctaaccacacacacacacacacacacacacacacgcacacgcacacacacacacacacacacacacacacacacaataagagcagaagcatgtgttcctgagcattgcagatatgtaactggtaaacatgccaactaaggttgtgggttgttttcacattggctctgtgtgcatgaaggcgttttaatgacagcttttgggctgcaggaattcgatatcaagcttatcgataccgncgacctcgagggggggcccggtacccagcttttgttccctttagtgagggttaattgcgcgcttggcgtaatcatggtcatagctgtttcctgtgtgaaattgttatccgctcacaattccacacaacatacgagccggaagcataaagtgtaaagcctggggtgcctaatgagtgagctaactcacattaattgcgttgcgctcactgcccgntttccagtcgggaaacctggcgngccagctgcattaana

SEQ ID NO: 1082 - DNA, 20 bp, Oreochromis niloticus
gcaagttgagaggctactgt

SEQ ID NO: 1083 - DNA, 21 bp, Oreochromis niloticus
aaacaacccacaaccttagtt

SEQ ID NO: 1084 - DNA, 617 bp, Oreochromis niloticus; identical to SEQ ID NO: 347
  misc_feature 6, 7, 9, 11, 12, 17, 20, 23, 27, 28, 29, 31, 32, 36, 44: n = A,T,C or G

SEQ ID NO: 1085 - DNA, 16 bp, Oreochromis niloticus
tgctgctgagccaaga

SEQ ID NO: 1086 - DNA, 21 bp, Oreochromis niloticus
gtctccgttttgaacatttct

SEQ ID NO: 1087 - DNA, 588 bp, Oreochromis niloticus; identical to SEQ ID NO: 348
  misc_feature 102, 469, 472, 492, 498, 507, 517, 526, 531, 547, 558, 561,582, 585: n = A,T,C or G

SEQ ID NO: 1088 - DNA, 17 bp, Oreochromis niloticus
ccaccatgccatccaca

SEQ ID NO: 1089 - DNA, 21 bp, Oreochromis niloticus
tgtcggtaggagccaaataca

SEQ ID NO: 1090 - DNA, 612 bp, Oreochromis niloticus
  misc_feature 2, 3, 4, 7, 9, 14, 20, 21, 26, 39, 43, 57: n = A,T,C or G
tnnnttntntcttngatagnnatctnttggaaaccccgncccntttcgaggtcgacngtatcgataagcttgatatcgaattcctgcagccccctgagggtttcttaagccacatttatctgctcgtttgtcaagcgaactcatatatctaagtgcaaataattgttttaaccccctccccacacacacacacacacacacacacacacacccaaacaaacaaacaaacacgtgtgtgcctgtttacatctgtgatctaatttcttctcgtctctgtgtgcacactctctgtcccagcggtgtagtgtgtagtaagagggggggatccactagttctagagcggccgccaccgcggtggagctccaattcgccctatagtgagtcgtattacgcgcgctcactggccgtcgttttacaacgtcgtgactgggaaaaccctggcgttacccaacttaatcgccttgcagcacatccccctttcgccagctggcgtaatagcgaagaggcccgcaccgatcgcccttcccaacagttgcgcagcctgaatggcgaatggaaattgtaagcgttaatattttgttaaaattcgcgttaaatttttggtaaatcac

SEQ ID NO: 1091 - DNA, 21 bp, Oreochromis niloticus
taaagccacatttatctgctc

SEQ ID NO: 1092 - DNA, 16 bp, Oreochromis niloticus
ctacaccgctgggaca

SEQ ID NO: 1093 - DNA, 241 bp, Oreochromis niloticus
tctaaatgctctaactgatctgtacacaagagtacgttaatgtacacacacacacacacacacacacacacaaattacagggcaacaatttgcatagcagtcaaatgtgagcgcacaccgagacgtttccccttacctgtgctgtagagcgtccgtgttttcttcttcggtgcaggtggcagcaggcagctgtccacagactctatccctggcagcagtgggaagctgagggctcgacctc

SEQ ID NO: 1094 - DNA, 27 bp, Oreochromis niloticus
aaatgctctaactgatctgtacacaag

SEQ ID NO: 1095 - DNA, 20 bp, Oreochromis niloticus
ggacgctctacagcacaggt

SEQ ID NO: 1096 - DNA, 659 bp, Oreochromis niloticus
  misc_feature 2, 3, 4, 5, 8, 9, 10, 12, 13, 14, 15, 19, 20, 35, 43, 532,643: n = A,T,C or G
gnnnnttnnntnnnnctanngatcctttggaagcnccccgcgntggcggccgctctagaactagtggatccccccctgatgtgtcacaagggtttgtcaagatcacagcagggtccccaagagataatctcagttttgggttttggaggcagggcgtaaaagagggtgtgtgtgttgttaggctgctggcagctgacagagatacacagcatgcacaaatagaaagtacgagaaagatgacaatacgctgaggtcacacaaacacgcgcgctcgcacactgctcatgcaaatgcacacgcattcattcacgccttgatggcaccatctgccctctcctgcagcctctctgtaagcctggatgcaaactgttgcttataatatcatacctgctgagtaatatgcacacgcacacacacacacgcatgcatatggacacacacacttacatatgctcaaacagcagtgaaaaagttgtaagtagtttgacagaaaaagatcaggaatatgaaaaacgcacgcacacacacactnacacacacacacacacacacacacacacacttacacacacacacacgcacacacacacttacacacacacacacacacacacacacacacacacacacacacacacacacnacgtgttcttgatcct

SEQ ID NO: 1097 - DNA, 21 bp, Oreochromis niloticus
agccccttaatgagatcaaag

SEQ ID NO: 1098 - DNA, 20 bp, Oreochromis niloticus
cctctctgtaagcctggatg

SEQ ID NO: 1099 - DNA, 665 bp, Oreochromis niloticus
  misc_feature 3, 19, 20, 32, 39, 498, 551, 552, 571, 610, 655, 656, 665: n = A,T,C or G
ttngatcccttgaacgccnntcctttaggtcnacggtcncgataagcttgatatcgaattcctgcagcccatcgctgtgtatttctatcacagaggacagtgtttaccatcactctctgtttcccttaatctgaaacgttatttgcatctttcctcaagggatgactcggtcgtgtctccctctgcttcagtgagttagagaagtgtgtgtgtgtgtgtgtgtgtgtgcgtgcgtgtgtgtgtgtgtgcatttctgcatgtgtgtctgccgctcctctttaattaccgtctctttttctctgcaccattgctaaacttcctccacaggttcctgctggtgtctgagtgtgtgggcaacatgccaatgacagtcttttcatttcacagaatagggtggcatggtagtgcagtggttacccctgtctcctcacagcaagtcggtcccacgtttgaatcctggacggcgcatctctgcgtggactttgctccgggttcttnctgcagtccaaacacatgcagttagctgagaattcgaactgactgtgcgtgtnncacgatcttatagccccgngttggtgtcttactgcatatcttaataatgttagtgctnaggtgctttttaccctaacaattcacatctcgccttcttttccgnncatcaagan

SEQ ID NO: 1100 - DNA, 21 bp, Oreochromis niloticus
atcgctgtgtatttctatcac

SEQ ID NO: 1101 - DNA, 17 bp, Oreochromis niloticus
atgccaccctattctgt

SEQ ID NO: 1102 - DNA, 408 bp, Oreochromis niloticus
cccagttcatattaccatcaagttggtgctccacaaacactttcacagaagcacatacagaatagcgcactgttgcatttgcatgaagacaagttcatcagttcctcaacctctcccgaccccctctgatttcctgcccagccactcctattacctgcagaaacaggaaaatggttatacatcctccatacatctacagtggtgggtgtttgccatgcagtaaatggctggaatattaaatgagtttattggatgcttctatacaggcgccgctgcagaaataggactgaattatacatagatttagagatgtgtgtgtgtgtgtgtgtgtgtgtggagtgggaaaatagggggagagaaaaacaaagcagcaaaggtctatgtagaatcagctgtcaattatgctgg

SEQ ID NO: 1103 - DNA, 20 bp, Oreochromis niloticus
catgcagtaaatggctggaa

SEQ ID NO: 1104 - DNA, 22 bp, Oreochromis niloticus
ccagcataattgacagctgatt

SEQ ID NO: 1105 - DNA, 471 bp, Oreochromis niloticus
cccaaggacaaataaatatatcccgtgtatttagttatttatagacacgcgtgcgtgtgcgtgtgttctgtctgtcatgagtaagagactattacacctctcggaaaactgggacgcggtacatgcgagtgcctgtggagatgtacaaaagaggagaagagccacacacacacacacacacacacacactcacaggaataattaatcaatattgtttccattagcaagccggagaaggaagacactgcaccataattaggagacactgcagagctgcaacctcctctcatcaagcagtaaatcaagatgtacacacacacactcacacacacacacacactgcaggcttttttttttttttttttgcatgacctctcttcatgacagattctaaatgaccacaaatgactcaggaatggacgttttgttatgtcatcaaaggcaaaaaaagacactaagggtagggcaggg

SEQ ID NO: 1106 - DNA, 20 bp, Oreochromis niloticus
cgagtgcctgtggagatgta

SEQ ID NO: 1107 - DNA, 22 bp, Oreochromis niloticus
ctgtcatgaagagaggtcatgc

SEQ ID NO: 1108 - DNA, 669 bp, Oreochromis niloticus
  misc_feature 6, 12, 14, 506, 534, 538, 539, 544, 564, 565, 577, 580,587, 621, 628, 634, 658, 663, 666, 668, 669: n = A,T,C or G
tttganattccntnggcactggcccccccctcgaggtcgacggtatcgataagcttgatatcgaattcctgcagcccccataataaaccttccacatagttacctgttctgtttccaccatatccctgtctcacacacacacacacacacacacacacacacacacacacacacacacactacttaacacactggaacttccagacccgcccagtcatgttttattgaagtctcctttatttgtttgcttggatcagcgacttttaggtattttgtttttttacttagtcatttttattactttttttttttttttttttttgctttggtcagccatcttggcagtaatggctggcatggcacatgatgatgactgcattgcgttacctttggtgcatgcaacacatgcttgaagcccagagagcgacacacccatccaaacatctgctgcttggcagggctccagcagggggggatccactagttctagagcggccgcaaccggnggtggagctcccattcgcctataagggngtcnntttanccgcgcttactgggcccgtnngtttacaaacgntcncggactngggaaaacccttgggggttacccaacttaattcncctttgnaagaanaatcccccttttttggcaaggttnggggngtnann

SEQ ID NO: 1109 - DNA, 18 bp, Oreochromis niloticus
acctgttctgtttccacc

SEQ ID NO: 1110 - DNA, 21 bp, Oreochromis niloticus
aaatacctaaaagtcgctgat

SEQ ID NO: 1111 - DNA, 225 bp, Oreochromis niloticus
  misc_feature 8, 24, 29: n = A,T,C or G
tgacaaancccttttttttctttnttttnttttttttgcttaactctaagcaactacagcagtaataaataagattcttcacttataaatctcacatatgtattatgtagcactgacatgtgcaaggatgtgtacacacacacacacacacacacacacacacttttatgtgttgatgagggtgacagtattctaggtagtcatgcagtaggagaccctctgttg

SEQ ID NO: 1112 - DNA, 20 bp, Oreochromis niloticus
gcactgacatgtgcaaggat

SEQ ID NO: 1113 - DNA, 21 bp, Oreochromis niloticus
caacagagggtctcctactgc

SEQ ID NO: 1114 - DNA, 687 bp, Oreochromis niloticus
  misc_feature 428, 485, 499, 515, 519, 525, 526, 534, 540, 548, 566, 570,571, 575, 579, 584, 590, 593, 594, 597, 599, 600, 616, 622, 636, 637, 655, 657, 660, 662, 663, 666, 667, 671, 685: n = A,T,C or G
tttgaaatccttggaccggcccccccctcgaggtcgacggtatcgataagcttgatatcgaattcctgcagcccacaacgttggtgtaactccaacacacactaacctttgaaacaacaccaaaccaattagacttctccactgtcttgaacatgttacctagcaacattgtatccctgcagtgactttgtgcttatgtgtgtgtgtgtgtgtgtgtgtgtgtgtgtgtgttgattttgtgctgcaagaggaatctccatggaaacaacaacaggcagacacaacagcacagcttgactcacctgaaaatcatctgtcctacagataaaacacaggcgaacgaaccgagtctttgtttgtggctcgtagtgtctaaataggacctttagccaataagatccgagaaaaatccaaagacggattacatnctaaatgttaatcacaactcatgggatgtgtgtagacaactctaacacacttcctgncacacctgttttantggcaacttaattaanaatnggaagnnttgcattnaatatnggaccatnattttgggggggatcccncttnntttnttanaagcnggcccngcnntcntnnggggggggagcctccnaaattnggcccttttatagnnggaattttcgctattttncngtngnngannttanatggggctcccttncc

SEQ ID NO: 1115 - DNA, 21 bp, Oreochromis niloticus
acctagcaacattgtatccct

SEQ ID NO: 1116 - DNA, 21 bp, Oreochromis niloticus
tcgcctgtgttttatctgtag

SEQ ID NO: 1117 - DNA, 361 bp, Oreochromis niloticus
  misc_feature 9, 15: n = A,T,C or G
gcaatcctnctcggnacccccttgtggttcttacccgagtgactccctgcaggttcagggagaagaggtgaggattcacggcgatgaagtctccgtagaactcctgcagacacacacacacacacacacacacacacacacacacacacacacacacacacacagacagtaagctatacttctgctattttggttttgatgatgtcactcaggtgtatgaactgtgttcacaccaaacatgaagcagagtgatggtgatgctcacgcagggaggaggacagctttccaagacatcctatgaattctcggcacagttttgttctgtgtctgcattaaaattaaatttgatcaaacagctcgg

SEQ ID NO: 1118 - DNA, 20 bp, Oreochromis niloticus
gattcacggcgatgaagtct

SEQ ID NO: 1119 - DNA, 20 bp, Oreochromis niloticus
cgtgagcatcaccatcactc

SEQ ID NO: 1120 - DNA, 631 bp, Oreochromis niloticus
  misc_feature 1, 2, 3, 4, 6, 7, 10, 11, 12, 13, 15, 16, 17, 18, 19, 20,23, 24, 28, 30, 34, 37, 44, 50, 53, 65, 72, 82, 87, 122, 125, 127, 149, 153, 154, 441, 479, 502, 509, 531, 534, 544, 547, 567, 616, 626: n = A,T,C or G
nnnngnnggnnnngnnnnnntanntttntnttcnatnggaacgnggatcnaangggaacggctcnttcgtantggggaaacntaccnataagcttgatatcgaattcctgcagcccaaattntgntntctgctgccttgattgatgatnggcnnggttttttcttgctcactttctctttactctatccagattgtttctcgaccagctaagtctataatattgggaaagatgttttgattgtcaacaatccaaacacacacataaacacacacacacacacacacacacacacacacacacacacacaaatgcacccccaaactcatacgttcatactcaaacgcatatttctataccttgagcaaccccaccctgaagtggactccactttatgaactgtttagagagacactggtaagtggaatataaatatacattngggggatccactagttctagagcggccgccaccgcggnggagctccaattcgccctatagngagtcgnattacgcgcgctcactggccgncgntttacaacgncgngactgggaaaaccctggcgntacccaacttaatcgccttgcagcacatccccctttcgccagctggcgnaatagcgaanaggcc

SEQ ID NO: 1121 - DNA, 19 bp, Oreochromis niloticus
ttgggaaagatgttttgat

SEQ ID NO: 1122 - DNA, 21 bp, Oreochromis niloticus
gaaatatgcgtttgagtatga

SEQ ID NO: 1123 - DNA, 610 bp, Oreochromis niloticus; identical to SEQ ID NO: 349
  misc_feature 3, 5, 9, 11, 14, 15, 20, 28, 39, 59, 62, 101, 102, 130: n = A,T,C or G

SEQ ID NO: 1124 - DNA, 21 bp, Oreochromis niloticus
caatgagatcatcccataaaa

SEQ ID NO: 1125 - DNA, 20 bp, Oreochromis niloticus
gtgactgcaacccaactatt

SEQ ID NO: 1126 - DNA, 537 bp, Oreochromis niloticus; identical to SEQ ID NO: 350
  misc_feature 3, 7, 17, 20, 21, 22, 23, 35, 40, 83, 86, 456, 463, 471,489, 510, 533: n = A,T,C or G

SEQ ID NO: 1127 - DNA, 18 bp, Oreochromis niloticus
ataaggtcgggtcaccat

SEQ ID NO: 1128 - DNA, 19 bp, Oreochromis niloticus
agggcaacagactatctct

SEQ ID NO: 1129 - DNA, 836 bp, Oreochromis niloticus; identical to SEQ ID NO: 351
  misc_feature 5, 6, 7, 8, 15, 21, 30, 37, 44, 46, 513, 580, 645, 659,660, 665, 666, 668, 670, 677, 696, 705, 768, 769, 774, 787, 789, 795, 803, 806, 809, 815, 827, 833: n = A,T,C or G

SEQ ID NO: 1130 - DNA, 21 bp, Oreochromis niloticus
tacagaagtcgaggcgagatg

SEQ ID NO: 1131 - DNA, 19 bp, Oreochromis niloticus
gtggtggcgattgtgtcat

SEQ ID NO: 1132 - DNA, 693 bp, Oreochromis niloticus
  misc_feature 5, 8, 49, 55, 486, 523, 542, 557, 572, 593, 599, 602, 606,610, 613, 614, 617, 623, 629, 634, 637, 638, 643, 644, 646, 651, 654, 662, 666, 671, 672: n = A,T,C or G
gggtngantctctttgacataagactcttggaaagcccccgctttggcngccgcnctagaactagtggatccccccctgcattttgtctgcctcagtctcctgggggcagttattgcagcttcctgtgctcattatcattatctatcacacacacacacacacacacacacacacacacacacacacacacacacacaccacaagaaaattgctgatttatgtgtcatggcatgtttttttccctttgggtttccttacagatacagtttgtgatacatcatgcttttctatttgtgttcaatccttttattatattttcttctattttctcccccatgttttgttttttctgccggtcagcttagacatcaggcagcagtggtgggacgccatcacatgtagacaaactggaatctaaccattgtgtgaaagaatgtagggggacagacgtttcaaacacagcaagtgtgggctgcaggaattcnatatcaagcttatcgataccgtcgaccttcagggggngggcccggtacccccagcnttttggtcccctttnaagtggatgggtttnaattgcccccccttttgccgntaaatncgngggnccanaannttngttttnctgggnggtgnaannccggnncnccccnttnaaaaattncccncaaannatttatccttcccccccccct

SEQ ID NO: 1133 - DNA, 20 bp, Oreochromis niloticus
agttattgcggcttcctgtg

SEQ ID NO: 1134 - DNA, 21 bp, Oreochromis niloticus
aaacaaaacatgggggagaaa

SEQ ID NO: 1135 - DNA, 547 bp, Oreochromis niloticus
  misc_feature 2, 7, 15, 103, 119, 283, 468, 525: n = A,T,C or G
tncgttncccgcggnggcggccgctctagaactagtggatcccccacgatgaccttaagcagagctagataaaaatgaaacccatcgtgtctccgtttatggnttaccaaatgaagaangagtgccccgccaaagtaaaacaacacagtccaagttccagatctgctcacagcatttgctgctggcggcatattttttttggctattacacgagttttagtcttttagtgacatgatgaggatgtcagggggtcagaggtcacagagagatggatgaaccctnatttgtctcagacttaaagtgacctgtgtgggctattatgaaacaactgcacttgtagaatcatgatcaaggagataagatgagaggagcgggactgttgctcacagaagggttattagaaaatgctgtgtgtgcgtgcgtgtgtgtgtgtgtgtgtgtgtgtgtgtgtgcaattccagcgcctnattattgctcagttgcttggagactgccacagggcagcgttcacacgggggctgcangaattcgatatcaagcttatcc

SEQ ID NO: 1136 - DNA, 21 bp, Oreochromis niloticus
ctgtgtgggctattatgaaac

SEQ ID NO: 1137 - DNA, 16 bp, Oreochromis niloticus
ggcagtctccaagcaa

SEQ ID NO: 1138 - DNA, 381 bp, Oreochromis niloticus
gcagcacactgttcaaatgtaaaatgcttccacgcacctttggtgaaacgtacagcgctgtgatctccaaacacatcgtctgtatccttgaagcctgcagatatgctgaatgcatcccctcttggtggctcagggtcttttttctcctgcctttgtggcacactttgtgtttctgtgcactctgctgctcccagctgtcaatgaatggttttcaaggaaaccacagagagcagcgagtgtgtgtgtgtgtgtgtgtgtgtgtgtgtgtgtgtgtgtgtgtgtgtgtgtgtgtcacattacaggcaaaaacacccatcagctctgcacgggtggttctgtgatgtcagtgttttctacatacaggctttacctcagcgggct

SEQ ID NO: 1139 - DNA, 20 bp, Oreochromis niloticus
tttttctcctgcctttgtgg

SEQ ID NO: 1140 - DNA, 21 bp, Oreochromis niloticus
cgctgaggtaaagcctgtatg

SEQ ID NO: 1141 - DNA, 221 bp, Oreochromis niloticus
aacccaccctagtttaaatactcagacacacacactcacacgtcacctcaatccttcccagagtgcctttgttctgtcgattgttctgtgtgtgtgtgtgtgtgtgtgtgtgtgtgtgtgtgtgtgtgtgttataaggagagagaatcatgccatacgaaaaatgacaaccagtaaggaccgtgcctgccaaaaacctaagacatacaaagcatgaggtgt

SEQ ID NO: 1142 - DNA, 20 bp, Oreochromis niloticus
tcccagagtgcctttgttct

SEQ ID NO: 1143 - DNA, 20 bp, Oreochromis niloticus
gcacggtccttactggttgt

SEQ ID NO: 1144 - DNA, 597 bp, Oreochromis niloticus
  misc_feature 2, 3, 7, 8, 13, 112, 539, 572, 578, 591: n = A,T,C or G
anntccnnaagcnctttggaataccccggccctttctggaggtcgacggtatcgataagcttgatatcgaattcctgcagcccttaaaaaacaaaacaaaaacaaaagcagntctcttggcaatttgcttaggtggcgggctgttgcctgcatggtgcctttcgtgactgttattcccacaggaagtgaaggttgtggaatgcccctgcagtctctctccatatgcccagaaaaaggaacacacacacacacacacacacgcacacacacacacacacacacacacacacacacaagcaaggacaggagaggctttgctttattgtgtggaacactatatttatggataatgtttgattcttggggggggatccactagttctagagcggccgccaccgcggtggagctccaattcgccctatagtgagtcgtattacgcgcgctcactggcccgtcgttttacaacggtcgtgactgggaaaacccttggcgttacccaacttaatcgccttgcagcacatccccctttcgccagctnggcgtaatagcgaagaggcccgcaccgatcgcncttccnaacagttgcgcanctgaat

SEQ ID NO: 1145 - DNA, 17 bp, Oreochromis niloticus
atgcccctgcagtctct

SEQ ID NO: 1146 - DNA, 21 bp, Oreochromis niloticus
ataaagcaaagcctctcctgt

SEQ ID NO: 1147 - DNA, 369 bp, Oreochromis niloticus
tgcagggctggaggtagcaggagtccactgttactgcacaacgctcgcgcacagacacatgcacacacaaaacctctcatccctctggagaaaatgaattctctttctctttttcctcttttccccccctttacctttttgcctctgtcagcgcaactaccataacttcaacctgaacacaaatcccatctctcacacacaaacatgcacacacacatatatgcacacacacacacacacacacacacacacacacacacacacacacacacacacacacacacacaaagagtcactcacctggtcacctgcccgaggggttgtgatgctgtttcactctttgcaggggtctctgtttcgtgtccgcct

SEQ ID NO: 1148 - DNA, 21 bp, Oreochromis niloticus
agcgcaactaccataacttca

SEQ ID NO: 1149 - DNA, 18 bp, Oreochromis niloticus
gcaggtgaccaggtgagt

SEQ ID NO: 1150 - DNA, 562 bp, Oreochromis niloticus; identical to SEQ ID NO: 352
  misc_feature 405, 435, 465, 485, 503, 532: n = A,T,C or G

SEQ ID NO: 1151 - DNA, 19 bp, Oreochromis niloticus
gggtgtcttcctggtgtca

SEQ ID NO: 1152 - DNA, 21 bp, Oreochromis niloticus
atcccccactctcttgtcatt

SEQ ID NO: 1153 - DNA, 562 bp, Oreochromis niloticus; identical to SEQ ID NO: 352
  misc_feature 405, 435, 465, 485, 503, 532: n = A,T,C or G

SEQ ID NO: 1154 - DNA, 19 bp, Oreochromis niloticus
gggtgtcttcctggtgtca

SEQ ID NO: 1155 - DNA, 21 bp, Oreochromis niloticus
atcccccactctcttgtcatt

SEQ ID NO: 1156 - DNA, 615 bp, Oreochromis niloticus
  misc_feature 314, 321, 456, 507, 586, 603: n = A,T,C or G
ttgaagaccgtagctccaccgcggtggcggccgctctagaactagtggatcccccacagtgagatcaagacctggaaacattttggggtatgtaggaattttgaagtgtgtgtgtgtgtgtgtgtggtgtttttcaccacaatatgccaactaattgaaaatgtttagacagatcctaacatcactactaaaaaaacctgtgatggtaatgtagtctttcttctagggtttctaaggggttgttgcacatttatcagctaatgagaagtgttatcagacattagatgggttgctatgcagcttgtttatctcantgattgnccacagataatgccttagtaagcattcagtgcattatcagttaaattgcctatttcccctcatgtatattaaactactcctgatgtggtgggctgcaggaattcgatatcaagcttatcgataccgtcgacctcnagggggggcccggtacccagcttttgttccctttagtgagggttaattgcncgcttggccgtaatcatgggcatagctgtttcctgtgtgaaaattgttatcccgctcaccaatttccaccaccaacatncgagcccggaagcatanaagtggttaaac

SEQ ID NO: 1157 - DNA, 21 bp, Oreochromis niloticus
caagacctggaaacattttgg

SEQ ID NO: 1158 - DNA, 21 bp, Oreochromis niloticus
caacaaccccttagaaaccct

SEQ ID NO: 1159 - DNA, 610 bp, Oreochromis niloticus
  misc_feature 3, 4, 17, 19, 23, 36, 459, 468, 561, 571, 575, 587, 588,591, 603, 604, 605, 606, 607, 610: n = A,T,C or G
ttnnatccctttggaanancccnccccttttggagntcgacccgtatcgataagcttgatatcgaattcctgcagccccctcatatctggggcagactgtgctttcaattcaatgccagcatgagctgtgcaactacatatagctgcagacgagcatgccaaaacatacatcaatggatcctctgatgtagtgcccttctgcatatctgactgtcaggtattttatgttactgacttatagtatttcataaagacgtgcttgaacttatatatacacacacacacacagacgcgcacacacacacacacacacacacacacacgcacacacaagctgttcaggctgggtggtaagcaccgggcgaactgccagtaaaggctagatgggagagctgtagaaagatggaagaagttaagcaggagaggagcggtgacggcatgggggggatccactagttntagagcggncgccaccgcggtgggagctccaattcgccctataggtgagtcctattacgcgcggctcactggccgtcgttttacaaccgtcctgaactgggnaaaaccctgngcgnttcccaaccttnnatngggcttggaggnnnnngcn

SEQ ID NO: 1160 - DNA, 21 bp, Oreochromis niloticus
ctctgatgtagtgcccttctg

SEQ ID NO: 1161 - DNA, 17 bp, Oreochromis niloticus
gtcaccgctcctctcct

SEQ ID NO: 1162 - DNA, 334 bp, Oreochromis niloticus
  misc_feature 2, 4, 21, 25, 36, 38, 47, 78, 98, 280, 281: n = A,T,C or G
tnancctttaagccttgaagncccncgagttagcgntngcccagctnggcggcacggagcagcttcccctgctggctnatttggtgctttattactgnggacatgcagaccagcctgttctggtgcagctctaccaggttgaggtcagagcagattcatgtgcacacacacacacacacacacacacagacacacacacagacatgcacaggacacaataaccatgaatacttccttcctctgcacagctcaccctggttggaggagagcggagaagagnngtgtttattcagtctctggagctcggacacacggctggaactagagctgtgaa

SEQ ID NO: 1163 - DNA, 20 bp, Oreochromis niloticus
cctgttctggtgcagctcta

SEQ ID NO: 1164 - DNA, 20 bp, Oreochromis niloticus
agctgtgcagaggaaggaag

SEQ ID NO: 1165 - DNA, 578 bp, Oreochromis niloticus
  misc_feature 451, 457, 458, 468, 477, 478, 484, 487, 510, 513, 515, 519,523, 530, 531, 533, 546, 550, 561, 562, 563, 568, 571, 574: n = A,T,C or G
attcccgtagctccccgcggtggcggccgctctagaactagtggatccccccctggcatcagcatccaagctagcaaaactgaaagtgtgcagagcttgaggttgcaagttgaagcaatggttttctagagtgggtggggtagggtgtgtgtgtgtgtgtgtgtgtgtgtcggtaggagggatatgagcgaggaaaggtaaatcatgaagccgaggttctcagggacagattgagatcataattcaaatcagccatattacagattgtgaagtggaggagagtgattgcctcaattaagccagtttgtcttgagggtcctctttgcttagtctgcacagctcacagtccctcctctttcagcatctcctcccgactcctcttcttctactctcacccaccttctcccgtagcccattaaatttgatggtgccatcatcatctgtgttctgnccttgnnaagtcccggnggctgcaannaattcnatntcaagccttatccatcccgtcanccntnaagngggnggccccnntnccccaattttttngttncccttttaacnnnagggnttnaantccg

SEQ ID NO: 1166 - DNA, 21 bp, Oreochromis niloticus
aatggttttctagagtgggtg

SEQ ID NO: 1167 - DNA, 19 bp, Oreochromis niloticus
cctcggcttcatgatttac

SEQ ID NO: 1168 - DNA, 404 bp, Oreochromis niloticus
  misc_feature 43: n = A,T,C or G
ccctcactcagacacacacagatgcatagtcctcacgcacgcncgcacacacacacacacacacacacacacacacacacacacacacacacacacacacacacgcgcgcgcgcacaggtaaccctttaatcacctgtactgtacgtcaacttttaagattttaatgcacacacacctcaaatttctgccgtagctcctcgttgccctcctccccctccggagggacaggtacattgaagtactcgccttcttcttgggagagcagcttaaacctaaagtgagagaatatttccagtcaaatcaattcccaattagtttatacaattggggtgtttaactgctgccattagctgaagctgctgacagttactgcaccaatttaagggtctaaagaataatcagg

SEQ ID NO: 1169 - DNA, 21 bp, Oreochromis niloticus
cacagatgcatagtcctcacg

SEQ ID NO: 1170 - DNA, 20 bp, Oreochromis niloticus
tcccaagaagaaggcgagta

SEQ ID NO: 1171 - DNA, 611 bp, Oreochromis niloticus; identical to SEQ ID NO: 353
  misc_feature 3, 4, 5, 6, 8, 9, 10, 11, 12, 15, 16, 20, 22, 29, 31, 33,40, 43, 49, 63, 67, 71, 91, 108, 109, 135, 347, 534, 546, 554, 578, 582, 595, 608, 611: n = A,T,C or G

SEQ ID NO: 1172 - DNA, 21 bp, Oreochromis niloticus
ggagtgaaccagtctcagaca

SEQ ID NO: 1173 - DNA, 19 bp, Oreochromis niloticus
tccctctttgcactcatca

SEQ ID NO: 1174 - DNA, 304 bp, Oreochromis niloticus; identical to SEQ ID NO: 354
  misc_feature 304: n = A,T,C or G

SEQ ID NO: 1175 - DNA, 20 bp, Oreochromis niloticus
gctggatttgcattgagtga

SEQ ID NO: 1176 - DNA, 20 bp, Oreochromis niloticus
tagaccgaggctgaaagctg

SEQ ID NO: 1177 - DNA, 405 bp, Oreochromis niloticus
  misc_feature 15: n = A,T,C or G
tgaattattaaaagngttgttttcccttattgcattgcagcaatgtgcctctttgctagaaatgagctgcacattgtggagtttgaatgcttaaagcgacccacctccaacagcaaagccaggagaggagcgccccccacccccgacacacacacacacacacacacacacacacacacacacacacacacatctgaatatctgaatgaccacaacgttatgctcagatggctctcttacgtttctcttatataatgcacgttgtgaactaactagtttgttttgctaaactgtgcagggctgcaactaatgattatctccattattgcctaatggacattacactataaagtgttggagaatggtgaaaatgcccatcacaattttctaaagcccaaggtgatt

SEQ ID NO: 1178 - DNA, 20 bp, Oreochromis niloticus
caacagcaaagccaggagag

SEQ ID NO: 1179 - DNA, 20 bp, Oreochromis niloticus
agccctgcacagtttagcaa

SEQ ID NO: 1180 - DNA, 484 bp, Oreochromis niloticus
  misc_feature 419: n = A,T,C or G
agaactagtggatcccccccacacagggtaagtctggcagctgtgtgaaggtcagctgatgctggactgctgagaggaaagtagctgcacgcgccctctgcagtctgtgtgtgtgtttatctgtctgcatcagtgtgtgtgtgtgtgtgtgtgtgtgtgtgtgtgcgtgcgtctgtgtgtgtgtccctgtgtttgtgtgtgtgtgtgtgttgtcctgtgatgtttatctacacactgtgttgacctcatttattatttacagccaccaaactgaagactgaaacaccaacagctgcagttcctgagacgtccagcagaggcagcagtgagccagccccacacagacagatgtgggttcaaacagcagcagctgcagctctgatgtttagactgtcattatcttccatccacaggtttgngctgcatttgcctttctagtctcactgaccactcaaagctttatcacacctacagccagttgaat

SEQ ID NO: 1181 - DNA, 19 bp, Oreochromis niloticus
gctggactgctgagaggaa

SEQ ID NO: 1182 - DNA, 21 bp, Oreochromis niloticus
ctgctgtttgaacccacatct

SEQ ID NO: 1183 - DNA, 180 bp, Oreochromis niloticus; identical to SEQ ID NO: 355

SEQ ID NO: 1184 - DNA, 20 bp, Oreochromis niloticus
atggtcttaaagggggcagt

SEQ ID NO: 1185 - DNA, 20 bp, Oreochromis niloticus
ggaggaagggctgatcaata

SEQ ID NO: 1186 - DNA, 309 bp, Oreochromis niloticus
aggtcttgtttttttttgttttttgttttttttaatatttgctctcacagccaacccagcagatgcagagagagggaagtgggttagaggtgaggggaacaccttccccatcaaagatccccgttctcctctccaacgctgagacagcaataaccaaggcagcttttgaatgttccagcatcactctcccaacacacacacacacacacacacacacacacacacacacacacacacacactataaataaccacaagtgtcgtaagaatagaaaaacaaaactaaaactgtaaatgatgacaaataagt

SEQ ID NO: 1187 - DNA, 16 bp, Oreochromis niloticus
acaccttccccatcaa

SEQ ID NO: 1188 - DNA, 21 bp, Oreochromis niloticus
tgagatcatcccataaaaagg

SEQ ID NO: 1189 - DNA, 645 bp, Oreochromis niloticus
  misc_feature 2, 3, 4, 10, 11, 15, 16, 27, 33, 35, 36, 38, 48, 58, 67,68, 88, 91, 111, 112, 114, 139, 141, 142, 398, 578, 591, 603, 622, 629, 641, 645: n = A,T,C or G
gnnnaggtgnngtgnnactttatcttntaacangnncncccaacgtgncctctcatcncttttgganntcgaccgtatcgataagctnganatcgaattcctgcagcccanntncaccatctcctcttcagccacgagngnnttccagtgtagtggaccaagctctcaccaaagcaaaggcttagaaagaacacacacacacacacacacacacacacacacacacacactgataaaagaggggtagtgataatggtggaggcttaagagcttcaaattgcccaaaatggaaagtgtgctctctgcaggagattgagagatagagagggaaccatgggtctgctatttttggtctactagggggatctaaatctgtggctggatggaagaaaagcctnctgggtaatgaccctaaaagcccacatcaaaaagagacacccacagtttttttctgatattcatggtggtgactggaaccaggtgtgataaaatagctgaaagctgaaaacaaaaagcaacgaatgacagagttcttatttttatcacagtttttaagccaaaaactgcaaaatcataangggtcaagttaantaccagataaanggcttttaattcataaatntggcaanaataacaaaaangaan

SEQ ID NO: 1190 - DNA, 18 bp, Oreochromis niloticus
ccacaacaccatctcctc

SEQ ID NO: 1191 - DNA, 21 bp, Oreochromis niloticus
ccattatcactacccctcttt

SEQ ID NO: 1192 - DNA, 559 bp, Oreochromis niloticus
  misc_feature 2, 3: n = A,T,C or G
anncctttgctccccgcggtggcggccgctctagaactagtggatcccccactcctctcattaacctctggtatttcagaccagtttccatttatatttaatgagagtctctgcacaagcgatttgtagtggtgagcagcaccatcacaaattctctttgactgtacggcacactccctccatggtcttttacaagatcccgctaaaggagcaaatgggatccccactatctgaactatgtgctatatatatatatgtgtgtgtgtgtgtgtgtgtgtgtgtgtagtagcaaagactgagcaagagagaggtaataggagaaagataagagatgcagagagaatgagaaaaagcaaagcagaaatagaaccatgtcttgaggttgtttgcttggaaaacttagcaatctgctgcttgagtgcccttctctttgtcacatccacctctgtggggggctgcaggaattcgatatcaagcttatcgataccgtcgacctcgagggggggcccggtcccagcttttggtccctttagtgagggttaattgcgcgcttggcgta

SEQ ID NO: 1193 - DNA, 21 bp, Oreochromis niloticus
tacaagatcccgctaaaggag

SEQ ID NO: 1194 - DNA, 19 bp, Oreochromis niloticus
ggcactcaagcagcagatt

SEQ ID NO: 1195 - DNA, 421 bp, Oreochromis niloticus; identical to SEQ ID NO: 372
  misc_feature 413: n = A,T,C or G

SEQ ID NO: 1196 - DNA, 20 bp, Oreochromis niloticus
atggtgcgctaggaatagca

SEQ ID NO: 1197 - DNA, 21 bp, Oreochromis niloticus
tgaatgaggctttcatctcca

SEQ ID NO: 1198 - DNA, 660 bp, Oreochromis niloticus; identical to SEQ ID NO: 356
  misc_feature 2, 3, 4, 5, 7, 8, 10, 11, 12, 15, 16, 20, 21, 22, 23, 24,25, 38, 652, 658: n = A,T,C or G

SEQ ID NO: 1199 - DNA, 16 bp, Oreochromis niloticus
tgcactttgggggatg

SEQ ID NO: 1200 - DNA, 21 bp, Oreochromis niloticus
taatagctctgccgtttgttc

SEQ ID NO: 1201 - DNA, 326 bp, Oreochromis niloticus
tttttaatacaacactgacacaaagttacatctctgactcgtgtgtgtgtgtgtgtgtgtgtgtgtgtgtgtgtgtgtgtttcgcattttgctaactttgtgagaacatgtttcagagtgaggtcagtttaatcttcagacctcagcctcagaaacccacggtctgcatgaatactgctttttttcttagcacttggaagtaactaagtacatttacttaagtacctatcagttttagtagaataattctcctccacagttcaggtgtaaactacgtcttttactccaattcatttgacatctatatcgacatacttcaggtatca

SEQ ID NO: 1202 - DNA, 25 bp, Oreochromis niloticus
cactgacacaaagttacatctctga

SEQ ID NO: 1203 - DNA, 19 bp, Oreochromis niloticus
agaccgtgggtttctgagg

SEQ ID NO: 1204 - DNA, 304 bp, Oreochromis niloticus
  misc_feature 4, 5: n = A,T,C or G
cccnncacagggttcaccaagcccacctgaggcacgccaggtctcactggggtcacacctgaaacaggaagcaggaagtgatacctgttggagcacctttgattggttagcatttttgaatgagcctgctttcaaaataaagagcggtgagacgtgtgggcggagcagactgccccaaactcaagatgagatgtcgtgtgggtggagcctgtgtgtgtgtgtgtgtgtgtgtgtgtgtgtatgtgtatgtgtgtggacagggctcaggtgttcctacctgtgatgacacctggagcctggtggg

SEQ ID NO: 1205 - DNA, 20 bp, Oreochromis niloticus
cctgttggagcacctttgat

SEQ ID NO: 1206 - DNA, 20 bp, Oreochromis niloticus
taggaacacctgagccctgt

SEQ ID NO: 1207 - DNA, 452 bp, Oreochromis niloticus
  misc_feature 93: n = A,T,C or G
tcgggaaggacaagctgctagactggctctgggtgatgggggggagtgatggtggggtgatggtgtttggcttgtcagggctcaacccacatncaaggaacagtctccacacacacacacacacacacacacacacacacacacacacacacacacacacacacacacacagatgctgtctcacacacacctaacagaatgtgacaggtctgcctctgaacagtgtccctgccacaaaacagaatttttcagtatttgtcttttagccacgctagcagcatgactccaggaatagcaatagagagctgaatcgctacactataccagctgatttctgttttttaagtctcaatcacgccgtaaaaggctaaaaccagagtctgaatgtaaaagatggctgtggcaaccataacatcactcacaggtttgagggctttttaaagccttcatgt

SEQ ID NO: 1208 - DNA, 20 bp, Oreochromis niloticus
gatggtgtttggcttgtcag

SEQ ID NO: 1209 - DNA, 20 bp, Oreochromis niloticus
attcctggagtcatgctgct

SEQ ID NO: 1210 - DNA, 545 bp, Oreochromis niloticus; identical to SEQ ID NO: 357
  misc_feature 2: n = A,T,C or G

SEQ ID NO: 1211 - DNA, 20 bp, Oreochromis niloticus
ggtgattcgccaacataagc

SEQ ID NO: 1212 - DNA, 21 bp, Oreochromis niloticus
aactgtgaaagacccctccag

SEQ ID NO: 1213 - DNA, 474 bp, Oreochromis niloticus
  misc_feature 412, 443: n = A,T,C or G
ccccttggggggacgttaaccgctgagctgtgtgtgtgtgagagaagtgaagacagaagagtctgatgttcatttttaaatgaaagaagatgatggacaacaggtatgacagcagtaatggcagtgtgtgtgtgtgtgtgtgtgtgtgtgtgagcggagtgtattattgacaaaacacaaatgtcttcatcacgtggactccaacatcagcgcacagagtcagacgctgtcagcacgtctgtcatcaggtgtgttgcgtcagtgtgtgttacacagcagacgagaaaatgttacctcctgcttttcttaaaaaagagcttttgaagcgatgcgtctcacaggaccaatcacctcagagcggtcaaacccaccttgggtcgggctgaaaggactcttgccttccataaacttncatgttgaagcttattggttacatttttggnaccgtcacacaactaaacacaagatgggggg

SEQ ID NO: 1214 - DNA, 20 bp, Oreochromis niloticus
ttaaccgctgagctgtgtgt

SEQ ID NO: 1215 - DNA, 20 bp, Oreochromis niloticus
gacgcaacacacctgatgac

SEQ ID NO: 1216 - DNA, 322 bp, Oreochromis niloticus
ccgtgacctatgtgggctgaatgctaacgggggctaaggaatgcagccgctggggtaaaacgccacacacacacacacacacacacacacacacacacacacacacacacacacacacacacacacacacacccttctctttttggaggagcactttaaaacgcagtcagagctgttgacttgtggctgcttttgggataagagacagaggtggagagatgggggtggatgtgtagcactctgccgccgaccggcaggatcaatgaagggcacttatgaagagaaagctcactgcttggaagatttacaatgaatggctcgg

SEQ ID NO: 1217 - DNA, 20 bp, Oreochromis niloticus
acctatgtgggctgaatgct

SEQ ID NO: 1218 - DNA, 20 bp, Oreochromis niloticus
caaaagcagccacaagtcaa

SEQ ID NO: 1219 - DNA, 605 bp, Oreochromis niloticus
  misc_feature 2, 3, 10, 34, 36, 38, 43, 48, 507, 515, 520, 528, 536, 541,545, 597: n = A,T,C or G
tnnttgtcgngatctttttgaaaaccccgctccntntngaggncgacngtatcgataagcttgatatcgaattcctgcagccccccctccctcacagcaaaggtttgtttgattgggtcctgcggcaaggtcacacacacacacacacacacacacacacacacacacacacacacacacacacacacagggggaacaatcaataacggatggctggattaaggtgtcaggacatctatgtgtccagccagcatacggctgaataactcttgaacacacacacacacacacacacacacacacacacacacacacacacacctccatatccagctttcctattgtccgctgtccatcaccacgggggggatccactagttctagagcggccgccaccgcggtggagctccaattcgccctatagtgagtcgtattacgcgcgctcactggccgtcgttttacaacgtcgtgactgggaaaaccctggcggttacccaacttaatcgncttggagnacatncccctttngcaggctngcgtnatancgaaagaggcccgcaccgatcgccttccaacagttgcgcaacctgaatggcnaatggaat

SEQ ID NO: 1220 - DNA, 21 bp, Oreochromis niloticus
acagggggaacaatcaataac

SEQ ID NO: 1221 - DNA, 20 bp, Oreochromis niloticus
gacagcggacaataggaaag

SEQ ID NO: 1222 - DNA, 639 bp, Oreochromis niloticus
  misc_feature 2, 8, 9, 10, 17, 35, 40, 42, 53, 55, 56, 68, 106, 107, 113,133, 399, 479, 502, 562, 563, 580, 582, 585, 598, 601, 602, 608, 615, 626, 629, 631, 636, 638, 639: n = A,T,C or G
cnagggtnnnttgctantttcatcttgtaacttanttatntnccgtaaaaacncnncccttttggagntcgaccgtatcgataagcttgatatcgaattcctgcanncccttngtgccgcagggagaaaacancatcgggacagatcacaaatgttattcactcaatggagctaatgaaacacacacacacacacacacacacacacacaccaaatgaatctttgcaaattactgtatctgaaccaccttttgacctgtaatttatacacatacttgtttttaatcaaagcatgcagtttgtgattattcagtttcagtaaccaaaggtaaaaaaataaccattatttgaactgactcgactgcatttgttttatcagaacaaaaatatgccccatctnaaggtgttacagctttgaccttcactcttttctaagtttttccaacaaagacactgtaaatgttacacaaaatgaaatgncacgacctggcatttgggggatncactagttctagagcggtcgccaccgcggtggagcctccaattcgcccttatagtgagtnngtattaccgcgcgcttnantgnccggtcgttttanaanngttgtngacttgnggaaaaacccnttngngtttncnn

SEQ ID NO: 1223 - DNA, 17 bp, Oreochromis niloticus
gccgcagggagaaaaca

SEQ ID NO: 1224 - DNA, 21 bp, Oreochromis niloticus
caggtcaaaaggtggttcaga

SEQ ID NO: 1225 - DNA, 805 bp, Oreochromis niloticus
  misc_feature 2, 11, 13, 19, 232, 417, 474, 476, 505, 511, 518, 535, 539,542, 550, 552, 559, 563, 573, 574, 578, 581, 601, 604, 610, 625, 632, 638, 655, 656, 663, 666, 675, 677, 680, 690, 691,693, 702, 703, 705, 706, 716, 719, 722, 724, 727, 728: n = A,T,C or G
  misc_feature 735, 736, 737, 744, 745, 746, 754, 757, 767, 768, 774, 776,777, 780, 781, 782, 784, 785, 788, 791, 792, 794, 797, 798, 799, 800, 803: n = A,T,C or G
tnttgacctantnaatgcncttttcaacgcggccgcggctcgctctagaactaagtggatcccccccgtgtgaagctctccgctgcttgcagtgcaaacaggcttacaggactctaggctgtggctgctcttcagtgtgctccatgctttgtgcagaaaactgcagctggtgcattgtgtgtgtgtgtgtgtgtgtgtgtgtgtgtgtgtgtgtgtgtgtggagggggggtncagacctcgggttcttcatcatcctgcaatgctgctgaagcagatgggctcaggtgctgcagctgggcacctctcctcactcatcggcagcaccggcgcttcagtctgacatcaatcatctaaacacaaacatgctcccgtacctggcgatggcgctcggggtctctgtctgtctgcgtgtcaantaaagctgctgtcttatcttgctgtgctcttggctaacattcatcactgtgcctgtntntgactaactgcatggagccctctctgatnaatganaactaanttgctttggatgttcanaagntanttaatcanangtttaancctntgtaagtctnntttnggnatgtcaacactttggggctncangaaatncatataagcttatcnataccgncaactncaagggggggccccgtnncccaacnttntgttccttnantgnagggttaaanncnccccttggnncnnaaacaatggncanaancnttnnttcccgnnncaaaaannnttatcccnctnacaatttccnnacaacntnncannncnnaanccnnanaannnnaancc

SEQ ID NO: 1226 - DNA, 21 bp, Oreochromis niloticus
agtgcaaacaggcttacagga

SEQ ID NO: 1227 - DNA, 20 bp, Oreochromis niloticus
agcattgcaggatgatgaag

SEQ ID NO: 1228 - DNA, 187 bp, Oreochromis niloticus
atcacttgttagccctctacatgcagaagtgtgtgtgtgtgtgtgtgtgtgtgtgtgtgtgtgtgtgtgtgtgtgtgtgtgtgtgtgtgtgtgtgtgtgtgtgtatctggaaaggctccattggggctgaaaggtatgaacaggttttagagaaacatctgctccatgcagatgtgtgtttcaggaa

SEQ ID NO: 1229 - DNA, 22 bp, Oreochromis niloticus
cacttgttagccctctacatgc

SEQ ID NO: 1230 - DNA, 20 bp, Oreochromis niloticus
tctgcatggagcagatgttt

SEQ ID NO: 1231 - DNA, 618 bp, Oreochromis niloticus
  misc_feature 3, 6, 7, 8, 9, 10, 13, 30, 38, 454, 612, 618: n = A,T,C or G
tgngtnnnnntcngattccttgggtaccgngccccccntcgaggtcgacggtatcgataagcttgatatcgaattcctgcagcccacatgttagagatggctgaggaacagagagggagaggtaacggaggacggaaaccacacacacacacacacacacacacacacacacacacacacacacacacacacacacacacacacacacacacagcggtatttgtttccagcagaatccgctgcgagagccgagatgaaaatcatcaccacactcgagcacagcagcatcaccggtttttgggggatccactagttctagagcggccgccaccgcggtggagctccaattcgccctatagtgagtcgtattacgcgcgctcactggccgtcgttttacaacgtcgtgactgggaaaaccctggcgttacccaacttaatcgccttgcagcacatncccctttcgccagctggcgtaatagcgaagaggcccgcaccgatcgcccttccaacagttgcgcagcctgaatggcgaatggaaattgtaagcgttaatattttggtaaaattcgcgttaaatttttgttaaatcagcttattttttaaccaataggncgaaan

SEQ ID NO: 1232 - DNA, 20 bp, Oreochromis niloticus
ttagagatggctgaggaaca

SEQ ID NO: 1233 - DNA, 21 bp, Oreochromis niloticus
attctgctggaaacaaatacc

SEQ ID NO: 1234 - DNA, 808 bp, Oreochromis niloticus
  misc_feature 3, 10, 13, 17, 21, 30, 131, 446, 567, 636, 639, 657, 720,725, 726, 734, 768, 780, 799, 804: n = A,T,C or G
tantttgatncgngaancttnttgaaagcncccctcgaggtcgacggtatcgatcagcttgatatcgaattcctgcagcccccatgacctcacctgaaaccctcaggctttggttcggtcgccatggagtncaacacctccatccatacccgtctcaccactgctaacgagtgcactccatttctgcagatctgtgacaccgctggtctggaacatctgtctacaagagtgggtgagtattcagagagcatattccatccctgatggtagtatggacagtttgagccatactcagtgctgtacactgagtctctctctctctctctctctcacacacacacacacacacacacacacacacgcagcatgagctgtaagataggagccacgctcaagacctaaatgaggtcctgcagaggaatcaccaccaggctgaaggagaccgncatccttcaccacatcatcactctgcacctgtggtgacctgatgatgaggtgtgagcatcctcccctgtagaagacagcagtcgggggggatccactagttctagaagcgggcgccaccgnggtggagctccaattccgcctatagtgagtcgtattacgcgcgctcactggccgtcgttttacaacgtnggngactggggaaaaaccctngcgttacccaacttaatcggctttgcagtacaatccccttttcgccagcttggcgttaatagncgaannaggcccgnaaccgaatcggccctttccaaacagttgcgcaancctgaattggcnaaatggaaattgtaaaccnttaanattt

SEQ ID NO: 1235 - DNA, 21 bp, Oreochromis niloticus
gctggtctggaacatctgtct

SEQ ID NO: 1236 - DNA, 19 bp, Oreochromis niloticus
cttcagcctggtggtgatt

SEQ ID NO: 1237 - DNA, 630 bp, Oreochromis niloticus; identical to SEQ ID NO: 358
  misc_feature 3, 4, 561, 615: n = A,T,C or G

SEQ ID NO: 1238 - DNA, 20 bp, Oreochromis niloticus
tcagaggggaaagtggaaaa

SEQ ID NO: 1239 - DNA, 21 bp, Oreochromis niloticus
caacacgcgtagcagtaatga

SEQ ID NO: 1240 - DNA, 317 bp, Oreochromis niloticus
caatgcccctccaaggacgggtgagcgagcgaggagcgagcagagtaatcacagttaaagagagagtgtgtgtgtgtgtgtgtgtgtgtctgtagggaggtgaataaacgtactacaggggacacaggaatggcttggtgctggaaaaaatggatggggatatgaaccgagtggaacatcctgtcccatctaccattcttcacatacttgcactcacacacggagcggttcggtgtggttatgttggtgttcttgagcagtggagtagacagatgagtgaatccaggatacggaatgtgttccagtactccaaacat

SEQ ID NO: 1241 - DNA, 20 bp, Oreochromis niloticus
cgaggagcgagcagagtaat

SEQ ID NO: 1242 - DNA, 20 bp, Oreochromis niloticus
ctccgtgtgtgagtgcaagt

SEQ ID NO: 1243 - DNA, 595 bp, Oreochromis niloticus
  misc_feature 6, 10, 15, 18, 23, 24, 27, 36, 40, 45, 50, 56, 67, 68, 79,110, 113, 475, 492, 564: n = A,T,C or G
ttgaantcgngagcnctnggaannccngtccctttnggangtcgncggtntcgatnagcttgatatnnaattcctgttnccctttagccagaatcggagaaaataaatanggngaagaaaagcttgtgcgccatcgacacgtcacacactccctccagcctcttggcaaggctgcagacagcactgcaaccaggacacaatgcctaaaaatctgcaactatctggcatatgctcctctgcaaaactctcaaggcttcaatacgagcctttctagtcaagcagactctctgctcccagtgatgcttagcaataaaagctctacagaggtctatttatgaatactaaccacactcccacacacacacacacacacacacacatccagatagctgatgaattcgaacagacagagagggacggtgaggcctgatccctgccataccaatattgctgtgtgggtgtcagtgtgtgtggncgtgtattacttattgntgtggggacacaaatttgttacacactcacattgtgaggtctcgcctactttatggggacaaattgcaaggnaaatcattcaattttagggtgaaggcttgac

SEQ ID NO: 1244 - DNA, 21 bp, Oreochromis niloticus
gacacaatgcctaaaaatctg

SEQ ID NO: 1245 - DNA, 16 bp, Oreochromis niloticus
cctcaccgtccctctc

SEQ ID NO: 1246 - DNA, 351 bp, Oreochromis niloticus
  misc_feature 27, 71, 72, 92: n = A,T,C or G
atgaaacaacagtcaggaataaacggngaagagcctgagtgggtattagtgatgtcactgacgcccatcanngttctcagttacagcagatnggcgtgtccgctgtcggaaaagatttgttcaaattagtgcaaataaatgaggattttggaaacaaacacacacacacacacacacacacacacacacacacacacacacacacacacacacatagatgaaacaaacaagtgaaggaaacaagatgccaactggttatcagaggagttggcatggcaacgggtaaagttgctatgggaatggtagtattaaaagagatgaaagaggaattatcagcacagttggaaagta

SEQ ID NO: 1247 - DNA, 19 bp, Oreochromis niloticus
gatgtcactgacgcccatc

SEQ ID NO: 1248 - DNA, 21 bp, Oreochromis niloticus
ccatagcaactttacccgttg

SEQ ID NO: 1249 - DNA, 619 bp, Oreochromis niloticus
  misc_feature 9, 48, 405, 416, 422, 474, 479, 488, 493, 497, 500, 507,516, 517, 520, 534, 544, 553, 581, 587, 591, 595, 599, 600, 607, 611, 613, 617: n = A,T,C or G
acacacctntacagttcaaatccactggacacataatgtaaaatctgnaccagaatcagtaaaaaacccacaatagtagcgactgcgccaacatatttttggttgtgtttgtgatgaaaaaagcagacaatcttactgagcgtagagaaactttcatgtggctctataaaccaatagaaaataagcaaagtgccatacacgagcgtatgctcacacacacacacacacacacacacacacacacacacacacacacactgcttcaaacgccgttcgtgtgttctcatgttctggagacattacacatcaaatgagtcccataagctgaagtatttttagaatctgaggatattttgctaattcacgcagcctcttttcactcacactgtcaacagcatcccgctngtgcacacacncgttgnaccgactgcaaaatgctgtgagaagtccaattcgatgctttttcaccactgnacaangggcttcanaaganaacngancccaaantgaaaaccnnatncccctggttttatnattaaatctnccccaaganattttgtgggggggggattcccctttantttttnaaanatgngccnncaccctngggngnaatntc

SEQ ID NO: 1250 - DNA, 21 bp, Oreochromis niloticus
aaaataagcaaagtgccatac

SEQ ID NO: 1251 - DNA, 20 bp, Oreochromis niloticus
ctgcgtgaattagcaaaata

SEQ ID NO: 1252 - DNA, 534 bp, Oreochromis niloticus
  misc_feature 507: n = A,T,C or G
acttgtctgtctctgtgaggaccaatctgagtttgcagccttgagactgatgtagttagtcttcactgtaggataaaatcttcaaaggcgtgcttggaggttcagacatagttttaaggttcaggttcggttaaggagctcagtaatgtagtatgtcaacaagagtcctcgcaaagacagagggaaaaataagcatgtgtgtgaggatgtgatgctggctgtccgcctaataagagcaaagcctcgctgaagttggagtgtttgatctcaaccagtcaccagcagctatgacagatggctctgactcacacacacacacacacacacacacacacacacacacacacacacacacacacacacacacacacacagacacacacacgtagacacacacacgcagatgagctttacagtctaaccacaggtgtaatgtgttggttttgtgttcacacagaccctacttcacagatcagtgtgtgtgttaccttgcagcaagtgaggttncagggtgcgatgctttcaggtatgttt

SEQ ID NO: 1253 - DNA, 20 bp, Oreochromis niloticus
cagctatgacagatggctct

SEQ ID NO: 1254 - DNA, 21 bp, Oreochromis niloticus
tgaagtagggtctgtgtgaac

SEQ ID NO: 1255 - DNA, 607 bp, Oreochromis niloticus; identical to SEQ ID NO: 359
  misc_feature 6, 8, 601: n = A,T,C or G

SEQ ID NO: 1256 - DNA, 17 bp, Oreochromis niloticus
gtccatccgtgccaagg

SEQ ID NO: 1257 - DNA, 21 bp, Oreochromis niloticus
ttgcttttgttctgctgggtt

SEQ ID NO: 1258 - DNA, 542 bp, Oreochromis niloticus; identical to SEQ ID NO: 360
  misc_feature 440, 491: n = A,T,C or G

SEQ ID NO: 1259 - DNA, 16 bp, Oreochromis niloticus
cgccctgagagcaaca

SEQ ID NO: 1260 - DNA, 21 bp, Oreochromis niloticus
agtgtgccgttccaaaaatac

SEQ ID NO: 1261 - DNA, 608 bp, Oreochromis niloticus
  misc_feature 2, 5, 10, 20, 44, 433, 457, 462, 464, 469, 473, 475, 476,493, 501, 508, 515, 522, 525, 526, 533, 534, 536, 537, 550, 554, 560, 572, 583, 585, 593, 603, 605, 607: n = A,T,C or G
tnttnttggnagtagatctnttggaatcccccgtggtgtttggncgctctagaactagtggatcccccccggtcctcgtgctctggtggacgttagcctgctagctgcctccattcattagctttattcgcacaacaacaacaaagcattgctgctccccagatgcagcccccaaaacacacacatacgaaagcacacacacacacacacacacacacacacacacacacacacacacacaactgcctaccacaactaccaccacccactgccaccacctcataaccattttttccattgtgtgttcttctccccctcgttctctccctctccctctcttcatgataacaacaacagagttgaagcctcttgaaaaactcactttgaatatcagattggctttgtgtgtgtgggcaggggatgtttgggaagntgttgacatttttggtgagacagnttggncnctacntttngnncttactttatgggttgngccccctntgaaaangggtttncatgganatnncagtctnnanntttactttaaggntttnaggggncctgtccccttnccccgcccgcncnggtttaangaaattttgntntna

SEQ ID NO: 1262 - DNA, 21 bp, Oreochromis niloticus
tagctttattcgcacaacaac

SEQ ID NO: 1263 - DNA, 18 bp, Oreochromis niloticus
gagggggagaagaacaca

SEQ ID NO: 1264 - DNA, 474 bp, Oreochromis niloticus
  misc_feature 461: n = A,T,C or G
tagactacgagcagatatgatgggaataacaatatctggagtcccgattcaactgtctgatccttatctctgcctgtatgattctgacattttcagatgttattactcacactcaaggatttgtatcctaaagcctcgacagtgacgacggcgctcaacagaaatgctgcatgtgcacaaatcccacggctctaccccctatccgcacacacacacacacacacacacacacacacacacacacacacacacacagacagaaacacccttgacagagatctgtgagccattcttcagtgtcacagtgagcgacgcctggcacatccttatacctgaagttgatcaatgcagatatgtccagggggaaattgaaatccataggaaattaggcggcgcaagtgatttattggaacagtaaatcatggtgcgtgtgatgtgtggagagtctgtgttccagcttncgtgcgccatact

SEQ ID NO: 1265 - DNA, 18 bp, Oreochromis niloticus
acggctctaccccctatc

SEQ ID NO: 1266 - DNA, 21 bp, Oreochromis niloticus
cgcctaatttcctatggattt

SEQ ID NO: 1267 - DNA, 270 bp, Oreochromis niloticus; identical to SEQ ID NO: 361

SEQ ID NO: 1268 - DNA, 20 bp, Oreochromis niloticus
tgcagctgaccttcactctt

SEQ ID NO: 1269 - DNA, 20 bp, Oreochromis niloticus
tgagcagacagcatgaaagc

SEQ ID NO: 1270 - DNA, 232 bp, Oreochromis niloticus
cccagataaagcatgtcagcaatataatatttacacctaagaaaatacatcacgatataaagtaaaaaaaacaaaacatccaactctatgtacttgcattcaagggataacctccaaaccagagagctattttagcacagattacataacgtaagataatcacatttgtgatgttctcacacacacacacacacacacacacaccaacaacaacaaagattaattacgaggg

SEQ ID NO: 1271 - DNA, 20 bp, Oreochromis niloticus
cccagataaagcatgtcagc

SEQ ID NO: 1272 - DNA, 25 bp, Oreochromis niloticus
ccctcgtaattaatctttgttgttg

SEQ ID NO: 1273 - DNA, 601 bp, Oreochromis niloticus; identical to SEQ ID NO: 362
  misc_feature 4, 5, 7, 8, 9, 10, 11, 14, 22, 23, 26, 27, 32, 35, 40, 42,50, 54, 59, 80, 83, 84, 105, 128, 133, 383, 435, 462, 538, 545, 548, 569, 572, 573, 574, 576, 579, 598, 600, 601: n = A,T,C or G

SEQ ID NO: 1274 - DNA, 19 bp, Oreochromis niloticus
ggataatgatggcagtggt

SEQ ID NO: 1275 - DNA, 21 bp, Oreochromis niloticus
tatttttcttcccaatggttc

SEQ ID NO: 1276 - DNA, 611 bp, Oreochromis niloticus
  misc_feature 2, 3, 4, 6, 7, 8, 9, 11, 13, 15, 19, 31, 611: n = A,T,C or G
tnnntnnnncnantnatcncttggatacccngccccctctcgaggtcgacggtatcgataagcttgatatcgaattcctgcagcccactttttattgccattgatttgttgacactgaaaaaagagagagatgtcttaaaacgtttgagatctgacacacacacacacacacacacacacacacacacacacacacagaggagccactgtttgccgtgcaagtttttactcgcagtcttggggttgtatgaagtttattcgagactttccctgacatcccccgcctttacagtttctgtatcttactgtgctcgggattagttctttcatgccattttgttgggctttgatccctgaccacattgatctcaaggcatgactagataacgctcgccccagtttttcctttccctcctcaagatacatctctgaagaataggcttgcattaccctccagccacatcttagattttttttttaaccagcccactttttttcatgagcatataatccctgttttttgggggatccactagttctagagcggccgccaccgcggtggagctccaattcgccctatagtgagtcgtattacgcgcgctcactggccn

SEQ ID NO: 1277 - DNA, 20 bp, Oreochromis niloticus
gccattgatttgttgacact

SEQ ID NO: 1278 - DNA, 21 bp, Oreochromis niloticus
aaaatggcatgaaagaactaa

SEQ ID NO: 1279 - DNA, 404 bp, Oreochromis niloticus
  misc_feature 351: n = A,T,C or G
gagagcgtaccttagctgacgcaatgatctggcgatgactgagtgtttgcttcagccttaagtagtgagcctgataaccagtgagccgcaggtgagtaatcacagctgattgccagcagctgcgtgcacagaggaaggtggagagacaagagaagccacactgagggtgggatgcacaaccatgcctacacacagactcacacacatgcactcacacacacacacacacacacccagggagaaaaacaactacagagacacaaaaaggaaaggagggcaagcaggagacagtaactatcgagctcctctcctcatagaaatacactggaatgtgtcacttctgttggttgnttagaatcacaggtttactttagtaaactaaattatttagacagccaatctaa

SEQ ID NO: 1280 - DNA, 20 bp, Oreochromis niloticus
gtgcacagaggaaggtggag

SEQ ID NO: 1281 - DNA, 21 bp, Oreochromis niloticus
ccctcctttcctttttgtgtc

SEQ ID NO: 1282 - DNA, 620 bp, Oreochromis niloticus
  misc_feature 6, 12, 36, 42, 470, 471, 474, 479, 487, 493, 501, 504, 515,531, 533, 534, 539, 541, 543, 549, 552, 555, 559, 560, 569, 573, 579, 580, 581, 584, 587, 588, 592, 595, 603, 606, 608,609, 617, 618: n = A,T,C or G
tctatntttganagcgatctctttggaactcccccncggttncggccgctctagaactagtggatccccccccactcatataaacacagcaaaagtgctactcacatcagtgctaacatcttaaagatatgcatattaatatagatattcacagttccacttttagtcagacagaatttatttgtttctgtgtgtgtgtgtgtgtgtgtgtgtgtgtgtgtgtgtgtgtgtgtgtgtagtgtctcagtgttactgatggagctggtgctgagaaacacatttgacttgagtgtggaaatgtcagtcgctttgattactgcacttaggcagctgtgacatttttcactactttacgtgcactcaacgcaaaggtcaaaacaaaaaggaccgggcctgctctatttcccaaacctatccagccagcgcctcatgggattggtggtgcccctgcccattgcctctctccctanntgnggggnagcccccncacccncttatctnatnctaaccctctnaaccctctttggctcncnnattcntncntccccnttnttnagcnntctatctcntaantgggtnnnccnctnnatcnctnaaaccttnatntnnatatctcnncg

SEQ ID NO: 1283 - DNA, 21 bp, Oreochromis niloticus
cccactcatataaacacagca

SEQ ID NO: 1284 - DNA, 20 bp, Oreochromis niloticus
cgactgacatttccacactc

SEQ ID NO: 1285 - DNA, 671 bp, Oreochromis niloticus
  misc_feature 2, 3, 4, 5, 7, 8, 11, 12, 13, 16, 17, 18, 21, 22, 23, 25,26, 34, 36, 38, 47, 94, 452, 528, 583, 585, 599, 603, 610, 618, 621, 623, 626, 627, 631, 633, 635, 640, 641, 643, 649, 666: n = A,T,C or G
gnnnngnnttnnnttnnnctnnnanntctttggnancnccaccgcgntggcggccgctctagaactagtggatcccccccgccgtcttctcctntgacgccaggtctgtgcagtgggatgccgggtaaagccccgggagaggcagcgctgtttccctgctgtttcctccttcgtgttaagacacgatcgcggttcagttgaaaagaatggaggagatgttaataaaggggaatatcagtcagaaggcacacacacacacacacacacacacacacacacacacacacacacacacacacacacacacagagttcagctgtctgaacacgaaaagctgataaggtgttttgggctgcaggaattcgatatcaagcttatcgataccgtcgacctcgagggggggcccggtacccagcttttgttccctttagtgagggttaattgcgcgcttnggcgtaatcatggtcatagctgtttcctgtgtgaaattgttatccgctcacaattccacacaacatacgagccggnagcatacaagtgtaaagcttggggtgctaatgagtgagcttactcacattaattngngttgggcttaatgnccgnttttcanttgggaanacntnttnngccnantnttttnnanaaattngcccccccggggggggnggcct

SEQ ID NO: 1286 - DNA, 17 bp, Oreochromis niloticus
ccctgctgtttcctcct

SEQ ID NO: 1287 - DNA, 21 bp, Oreochromis niloticus
ccttatcagcttttcgtgttc

SEQ ID NO: 1288 - DNA, 475 bp, Oreochromis niloticus
  misc_feature 420: n = A,T,C or G
gggaatagcacagtgtcctgggtgacatgtcacaaagcatagggcttagagagaacacacacacacacacacacacacacatcctcaaaatcaaacccatctctctgatagcactgctgccacccaacacagctcctgcttaaattaagtgttttgattattcagtaagtgtacgtacatttcattcctataagccagagggaaggaaggaaggcgtgagtgacaccagaggtcagcaacactcactgcagctatacttacattttacaaggattacatctgctcagtgataagcagtctttgtttatgtaatcaataaagcagcacagtttggaacagtgtgggacttcagcaacctgattaccagctgtctaactggctgactcgagcggctgtgggggaacagcagccccaataatncagtcgaggcagagagagctcggagggagtattccgtttagcggtgaccagcctc

SEQ ID NO: 1289 - DNA, 20 bp, Oreochromis niloticus
tagcacagtgtcctgggtga

SEQ ID NO: 1290 - DNA, 20 bp, Oreochromis niloticus
gtgtcactcacgccttcctt

SEQ ID NO: 1291 - DNA, 664 bp, Oreochromis niloticus; identical to SEQ ID NO: 363
  misc_feature 2, 3, 14, 19, 460, 565, 582, 592, 617, 637, 645, 654, 655,664: n = A,T,C or G

SEQ ID NO: 1292 - DNA, 17 bp, Oreochromis niloticus
gccatcacctcttgctt

SEQ ID NO: 1293 - DNA, 21 bp, Oreochromis niloticus
gagttagggcagaggttatgt

SEQ ID NO: 1294 - DNA, 647 bp, Oreochromis niloticus
  misc_feature 2, 6, 7, 8, 10, 11, 14, 15, 23, 24, 30, 34, 43, 47, 48,81, 462, 468, 470, 472, 488, 506, 514, 517, 527, 529, 531, 533, 543, 549, 551, 561, 565, 569, 574, 576, 578, 580, 582, 584, 587, 595, 602, 608, 609, 611, 612, 613, 614, 615, 617: n = A,T,C or G
  misc_feature 618, 620, 621, 627, 628, 632, 634, 636, 643, 647: n = A,T,C or G
gngagnnngnngannttgtattnngtctanaaanactttattnaaannctccccccttttgaggaaagacgcccgtcgggnagcttgatatcgaattcctgcagcccaaaatttctaaaaagtcctctgttacacatccacttacaccccctgtcacttcatgcacacacacacacacacacacacacacacacacacacacacacacacacacacatttatgtatagaaatacatttcagcgtacaacttaatatattaaaacagaagttgatctctccagttatacaacggattagctcatttagccttttaggtatgcactgcctcttttcatcatcaagtccggtgtccctctgcagatcttcactcctttgtttgttacagtcagctttatagaagtgacccaatcataaaacccccatggagtgttgcaaactctgtgtttgtgtgtgtatgtgcnaacacntnantgcctgtgtgtgcccntacccgtgtgtctatgtnagtgcacnttnaatgactgtntntncntacctgtgtntatgtntnaatgcacctnaatnaatntcctntngntntntnaantgtaacanttaaaancactgnntnnnnntnntnnttttgnncacntnantttcctncccn

SEQ ID NO: 1295 - DNA, 23 bp, Oreochromis niloticus
ccacttacaccccctgtcacttc

SEQ ID NO: 1296 - DNA, 25 bp, Oreochromis niloticus
acaccggacttgatgatgaaaagag

SEQ ID NO: 1297 - DNA, 621 bp, Oreochromis niloticus
  misc_feature 11, 16, 20, 23, 26, 88, 116, 118, 121, 409, 561, 570, 589,592, 594, 603, 604, 611, 612, 614: n = A,T,C or G
ttctcttgttnctacngatnctnggnattcccgcccctttcgaggtcgaccgtatcgataagcttgatatcgaattcctgcagcccanttacatttttttgaatgcattcagtttngnagncaaatacttattttcaggtattctgctttcaagagtaaaagtttaatttgtttcaccttacctagacttttcctttcttctttactggtctatttttttctataactgccccacacacacacacacacacacacacacacacagagtcatgcaccctcctctcccgttcagcctttctttttcctcccctgccctccttccttctcctcatcactgaaggtgtcaggactctaacgctgcagtgccatctggggggggatccactagttctagagcggccgccaccgnggtggagctccaattcgccctatagtgagtcgtattacgcgcgctcactggccgtcgttttacaacgtcgtgactgggaaaaccctggcgtacccaacttaatcgccttgcaagcacattcccctttcgccagctggcgttaatagccgaanaggccccgnacccgatcggccctttccnaanantttgcccanncctgaanngnccaaagg

SEQ ID NO: 1298 - DNA, 21 bp, Oreochromis niloticus
ttcagtttttcagccaaatac

SEQ ID NO: 1299 - DNA, 18 bp, Oreochromis niloticus
ctgcagcgttagagtcct

SEQ ID NO: 1300 - DNA, 620 bp, Oreochromis niloticus
  misc_feature 3, 13, 455, 620: n = A,T,C or G
ttntttgacgacntggagctccccgcggtggcggccgctctagaactagtggatcccccccgtagggatagaatatctaatatagaggagctctgtgtatttggacacttccacctttactttgacagacagacctggacaagcacacacaaaacccagccacataccaactgtggaaaacatctcacacactctactctttttcttaaaggtgcatctcttacacacacacacacacacacacacaagcaggcacatgcaaaaatgtggacacacattgcacaaacatgcaatttggacaataagccctgttctccgtacagaatggcatgtatgtgcgcaaaactacacaagaggtgagacggttcgatgagaagctacatgaaagatgtaaaagggggctgcaggaattcgatatcaagcttatcgatacccgtcgacctcgagggggggcnccggtacccagctttttgttcccttttagtgaagggtttaattgcgcgcttgggcgtaatcatggtcatagctgtttccctgtgtgaaaaattggttatccgctcacaattccacacaacatacgagccggaagataaaagtgtaaagcttggggtgctaaatgn

SEQ ID NO: 1301 - DNA, 21 bp, Oreochromis niloticus
cacttccacctttactttgac

SEQ ID NO: 1302 - DNA, 18 bp, Oreochromis niloticus
ggagaacagggcttattg

SEQ ID NO: 1303 - DNA, 331 bp, Oreochromis niloticus
cctggagagcggaaaacttggcgggatattcgtgttctgggcaattaggaatgttggaaacctgaactgaaatctgcttttggaggagcactcaatctgtcactcacagtcaaaacacagcacggaaaactcatccctgcacatggttcaaacttgcacacacacacacacacacacacacacacacacacacacacacagacacacacacacacatgcaggcactagagtgaaaaccacaactcaaatgcattaatgtacacctttaacaagtgcctgaaaatactcgcacccacagataaccaggggctagttagaccacccccgatgg

SEQ ID NO: 1304 - DNA, 20 bp, Oreochromis niloticus
acagcacggaaaactcatcc

SEQ ID NO: 1305 - DNA, 20 bp, Oreochromis niloticus
tagcccctggttatctgtgg

SEQ ID NO: 1306 - DNA, 629 bp, Oreochromis niloticus; identical to SEQ ID NO: 626
  misc_feature 1, 2, 3, 4, 5, 6, 9, 10, 11, 12, 13, 14, 15, 16, 17, 18,19, 20, 24, 25, 28, 30, 32, 37, 40, 50, 52, 57, 62, 545, 615: n = A,T,C or G

SEQ ID NO: 1307 - DNA, 18 bp, Oreochromis niloticus
aaagacgagcacgcactc

SEQ ID NO: 1308 - DNA, 21 bp, Oreochromis niloticus
ggtttacatcagcaaagtgga

SEQ ID NO: 1309 - DNA, 765 bp, Oreochromis niloticus
  misc_feature 9, 10, 19, 20, 579, 590, 614, 627, 653, 668, 675, 698, 702,706, 733: n = A,T,C or G
ttgaatgcnntcccgcggnngcggccgctctagaactagtggatcccccctgtgcccctaaattagccaatacaacatggcaaacaacacaagtagaatgtatcattaacatgcccgtttcagactgcatttcattttgccaatatgagtatgtttaactgcgcaggtcttcatgtgcgtcagcagctggtttttattttaatgaatctgactggagcctgaaccagaggtcacttccactctgcagcagaacaaagctggaacattggctccacacatcagaaagatggaacgaggctttgttgttgtgagagacgaggagaatgtgtgcacatgcacatatcctttttatagacgtgcaagggctcatatgcacacacacacacacacacacacacacacacacacacacacacacacacacacagagaggacgttcaactgtttataaaagaagcattttacaaaggcttcaacatataaagaaaaacgtgtcagtctgcagaaagcactccctcagtgcttcctgttttagtagattaggtttcagaaatcacaaactgtatgcaagcagtggangtgggctgcangaattcgatatcaagcttattganacccgtcgaactngagggggggcccggtacccagctttnggtccctttagtgangggtaanttgccccttggcgtaatcatggncatngctnttccctgggtgaaaatggtatcccgtnacaattcccacaactttcgagccggagcttaa

SEQ ID NO: 1310 - DNA, 20 bp, Oreochromis niloticus
tgttgtgagagacgaggaga

SEQ ID NO: 1311 - DNA, 21 bp, Oreochromis niloticus
gttgaagcctttgtaaaatgc

SEQ ID NO: 1312 - DNA, 605 bp, Oreochromis niloticus
  misc_feature 1, 8, 12, 14, 15, 17, 18, 19, 511, 560, 605: n = A,T,C or G
ntttgatncgtnanncnnntggaaccgcctggcggttcgctctagaactagtggatcccccccacacagtgggacacaacatcgtagttcatttatcctgacggcactctcgtagaagtgctgtgtgtgtgtgtgtgtgtgtgtgtgtgtgtgtgtgtgtgtgtgtgtgtgaggtgtttggggctcaagaagaaaaaaaaagaacccccagcatgtgtgctttggaaagctgggtattcatcatccttctccacacggtgtgagctccaaagagcgggagcggcgagatgagaggagagcagagatcggaaaatataggtctgagatcagtgataacaaggcaatctcacacatggtttcatgtgagatggtggaggaattttgggctgcaggaattcgatatcaagcttatcgataccgtcgacctcgagggggggcccggtacccagcttttgttccctttagtgagggttaattgcgcgcttggcgtaatcatggtcatagctgtttnctgtgtgaaattgttatccgctcacaattccacacaacatacgacccgnaagcataaaagtgtaaaccctggggttgccctaatgatgagctan

SEQ ID NO: 1313 - DNA, 21 bp, Oreochromis niloticus
catttatcctgacggcactct

SEQ ID NO: 1314 - DNA, 20 bp, Oreochromis niloticus
tttccgatctctgctctcct

SEQ ID NO: 1315 - DNA, 477 bp, Oreochromis niloticus
  misc_feature 468: n = A,T,C or G
atctggagcagagagcagagaccctgacacacggctgtcacccgaggcagacacgcagagatgtggacatagacaaagtctgcccccgtgtttctgcctccgcttctgtctatctgacacacacacacacacacacacacacacacacacacacacacacacacacacacacacacacacacacacacacactctttcactcacatgtaagtgacagcagaatggagattggtgagtcaaacggaagatgatggtgagaaaattcctgaggattttaccaggaggaaaactgaattgctatccacctaaaaatccctccccaaataaagtgcttgctctttgatggggcagaaaagttgaaaaacagtaagtagacttttttaatatgaagacaggttgtaagcagactattgtcatgtatgctggtatgataaaccattaaaccaccaacattattgatcagtcttnccaatgaaa

SEQ ID NO: 1316 - DNA, 20 bp, Oreochromis niloticus
cagacacgcagagatgtgga

SEQ ID NO: 1317 - DNA, 20 bp, Oreochromis niloticus
tcttccgtttgactcaccaa

SEQ ID NO: 1318 - DNA, 780 bp, Oreochromis niloticus; identical to SEQ ID NO: 368
  misc_feature 3, 4, 15, 18, 44, 45, 519, 573, 631, 636, 664, 667, 670,685, 689, 692, 704, 710, 713, 715, 730, 736, 749, 752, 762, 763: n = A,T,C or G

SEQ ID NO: 1319 - DNA, 20 bp, Oreochromis niloticus
catgcctgtaaaccttttcc

SEQ ID NO: 1320 - DNA, 21 bp, Oreochromis niloticus
atccagcgtttacagagtgaa

SEQ ID NO: 1321 - DNA, 386 bp, Oreochromis niloticus
cccggcaattacagcgtggtgttcacgaaggacgactttccaaagaaatgtgcgcagagcagagattcagattttcagcctttgctcgctgagctgtgatctgcagggtttcatgattctgtgtgtgtgtgtgtgtgtgtgtgtgtgtgtgtgtgtgtgtccaggtcagacgtgtgaccccagctgtcataacagctcgtgctgggcagcaggacaggatcactgtcagagatgtaagcacacactccttcctgctctcacacagtcgttctctgtacgttcaaagtcatgatgatggtacgtgtcgattgtctctctctctctgtctgtttctgttagtcaccaagctgctgtgtgcagagcagtgcagctggaggtgtcggggg

SEQ ID NO: 1322 - DNA, 19 bp, Oreochromis niloticus
gcgcagagcagagattcag

SEQ ID NO: 1323 - DNA, 20 bp, Oreochromis niloticus
agcaggaaggagtgtgtgct

SEQ ID NO: 1324 - DNA, 320 bp, Oreochromis niloticus
ttcctcagcagcctgctcaacttcagcaaggtcacacacacacacacacacacacacacacacactggtattattatacttgttccagctgcagcataaacctgagtttgagtcctcatgttcatgaagcttcacacactctattgaagaagtgacagatggacacacgctgacctcacacactcagatgtgtgtgtgcgtgtgtgtgtgtgtgtgtgtgtgtgtgtgtgtgtgtgttagggggaaactcccctctcatggtctcatcacctgctgtctctccgtgtgtcacatacctgctaagctgtggatctctgagg

SEQ ID NO: 1325 - DNA, 20 bp, Oreochromis niloticus
cagctgcagcataaacctga

SEQ ID NO: 1326 - DNA, 21 bp, Oreochromis niloticus
tcagagatccacagcttagca

SEQ ID NO: 1327 - DNA, 639 bp, Oreochromis niloticus
  misc_feature 1, 2, 5, 6, 7, 8, 12, 17, 536, 578, 585, 591, 594, 618,619, 639: n = A,T,C or G
nnttnnnnctantaacnctcttttggacacccggccccctctcgaggtcgacggtatcgataagcttgatatcgaattcctgcagcccccctacagtgcttactgactaatttaacaaagtaacaacaaacaaacaaaacattgaaacaaaatattaaccaacaaataaacttgtaaataaaccccaaaatataagtaaactaacaacaaactttaactaattcaaaaataataaaaaaataagaacaaatggctccaacaattagtaaatcttaaaagctaaagcactgtgtgtgtgtgtgtgtgtgtgtgtgtgtgtgtccatgtccatgctgtccagtctcttttccagctgctagaacacacctgttcaacatctattcagtcaatcatgtttatttcgcatctacggacacattatagacgtcttttatcaggctgtagagcgataagctttgatctttttttagtctataaatttgtcaaatggcatttttcctgggatgaatttaaaagcctcaagtgaaaaggatgcnttaaattaaaattttggaaataccattaaaaatggcaatggnaagagcnccaatnttngggattgcaatgggaaaaatgccnngcttttacacctttaaattn

SEQ ID NO: 1328 - DNA, 21 bp, Oreochromis niloticus
acttgtaaataaaccccaaaa

SEQ ID NO: 1329 - DNA, 19 bp, Oreochromis niloticus
ccgtagatgcgaaataaac

SEQ ID NO: 1330 - DNA, 449 bp, Oreochromis niloticus
ttctgtctggtaaaaggttatgagcagaggtgcgaggtgagacaaagtgcagctgaggtcgtgacatacacacacacacacacacacacacacacacacacacacacttagcagattgtaggtaagaggttagacatattttgcttgcaaactgcattttgtgcttgcataagttacagattgtgcaggactgtgcctgatggtccagacgataagcgagcgtccggcagcgacaggaagcacctgccgtggagacgaggcgatgttcttttttaactgtgtcacaagttgtcaacagaatatttgtggttttgacgtttgtattaaatgacttctaaagtcacagcagttggactttctgtttctgacagaaacctggcttcaacccggtgagtctgtagctttttcggaactggttcctcctaatttctcattcttcagtctccctc

SEQ ID NO: 1331 - DNA, 20 bp, Oreochromis niloticus
ggtgcgaggtgagacaaagt

SEQ ID NO: 1332 - DNA, 19 bp, Oreochromis niloticus
gacgctcgcttatcgtctg

SEQ ID NO: 1333 - DNA, 618 bp, Oreochromis niloticus
  misc_feature 28, 595: n = A,T,C or G
tttgatgcccttggctccccgcggtggnggccgctctagaactagtggatcccccactgatgggcaaactgaccaaatgacctcttcgtgcacacacacacacacacacacacacacacacacacacacacacacacacacacaaacaaaactcctcccagctcccccacgacactctaacttctaatgaactcacacaaacatatgtattcacacacataatacaccccctccacccaaacacacacacatacagacacttacagcccccccacccccacccctcgagggaatagatcagcaggagatgaaaggtgagggggctgcaggaattcgatatcaagcttatcgataccgtcgacctcgagggggggcccggtacccagcttttgttccctttagtgagggttaattgcgcgcttgggcgtaatcatggtcatagctgtttcctgtgtgaaattgttatccgctcacaattccacacaacatacgagccggaagcataaaagtgtaaagcctggggtgcctaatgagtgagctaactcacattaattgcgttgcgctcactgcccgctttccagtcgggaaaccttgntcgggcagctgcattaatgaatc

SEQ ID NO: 1334 - DNA, 19 bp, Oreochromis niloticus
gcaaactgaccaaatgacc

SEQ ID NO: 1335 - DNA, 21 bp, Oreochromis niloticus
ggggctgtaagtgtctgtatg

SEQ ID NO: 1336 - DNA, 262 bp, Oreochromis niloticus
tgggatttatagatcatctccctacagctgtcccttctcatccccgaaccccaccctcccctcccctccccaaacacacacacacacacacacacacacacacacacacacacacacacacgctaatattctgaggctcatgattccacatccaaacccatctacatctcctgtttttgtgtgtgatctttggagtcagtgaactgggtcttgggagtccagaacagtaatgctatctggaacccgggtcagctagaaacaa

SEQ ID NO: 1337 - DNA, 20 bp, Oreochromis niloticus
acagctgtcccttctcatcc

SEQ ID NO: 1338 - DNA, 20 bp, Oreochromis niloticus
tgttctggactcccaagacc

SEQ ID NO: 1339 - DNA, 651 bp, Oreochromis niloticus
  misc_feature 2, 4, 11, 16, 20, 22, 24, 33, 36, 62, 118, 440, 441, 444,445, 535, 537, 581: n = A,T,C or G
tntntggtccncgtgntctnangnaatgctccnccntttaggtaaacggcctcgataagctngatatcgaattcctgcagcccccggagttggttgaactttgacttaattgcagacngggcgctggtgggtgtcaggctcagcgacagagcgggagatggaggtggacagatcgccagactgctgtttgaaattgtattcatgcctctggtgttctgtctccttcttcatcgtgtcctcgctgctcttttctcactttctttctttcttttattctctccttcctttgctctcgctctctgcccccctccccttgtcatatttataatgcgtttgcctgcagggcatttttctataacctgaccttgcaacagagcgactgtaggacacgattatagtgatgcaaccactgtgtgtgtgtgtgtgtgtgtgtgtgtgtnnggnnggtatgccagcctctcagccattcttagcatcatgctgcaggcgctgtgtaacagctgcatggagaatgtcctggactgctctgagaggnanaggctgctgcacagtgggggggatccactagtttctagagcggncgcaccgcgggtggagctccaattcgccctatagtggaggtccgaattacgcgccgctcctggcccgtcg

SEQ ID NO: 1340 - DNA, 21 bp, Oreochromis niloticus
gagcgactgtaggacacgatt

SEQ ID NO: 1341 - DNA, 21 bp, Oreochromis niloticus
tgatgctaagaatggctgaga

SEQ ID NO: 1342 - DNA, 610 bp, Oreochromis niloticus
  misc_feature 1, 3, 6, 26, 31, 37: n = A,T,C or G
ntnttnttcctagtgatctcttgganacccngccccntttcgaggtcgacggtatcgataagcttgatatcgaattcctgcagcccccccagtccaaagcactctgtaacaaagagacaaaataaaaaatggtggatgaaaaccagcagaggagtgtcacatgggtgagagatttataatatgaatggttcaaactttctcataaatcagtgcaaaatgctttcaggtaggtatgctgacatttatgcatgagagatgtcaacagaacaagttcaatgaagagatgtgtggaagtgcaactatgtttatatggtcccggtgatagaaaacacacacacacacacacacacacacacacacacacacacacacacacagacgcatacatatttttctctatagggtaaaatcatcctgagaattgtggttgtccccacatgtcggggaaaaaacatctcagtgattcctcaaatgtgggggatccactagttctagagcggccgccaccgcggtggagctccaattcgccctatagtgagtcgtattacgcgcgctcactggccgtcgtttttacaacgtcgtgactgggaaaaccctggcgttacccact

SEQ ID NO: 1343 - DNA, 20 bp, Oreochromis niloticus
ggatgaaaaccagcagagga

SEQ ID NO: 1344 - DNA, 21 bp, Oreochromis niloticus
gggacaaccacaattctcagg

SEQ ID NO: 1345 - DNA, 590 bp, Oreochromis niloticus; identical to SEQ ID NO: 369
  misc_feature 2, 4, 5, 6, 9, 18, 23, 26, 32, 33, 34, 36, 42, 46, 52, 54,58, 60, 67, 70, 125, 132, 134, 136, 140, 326, 327, 392, 405, 429, 474, 497, 501, 502, 504, 505, 507, 511, 513, 520, 528,530, 531, 539, 540, 541, 542, 544, 545, 546, 549, 557: n = A,T,C or G
  misc_feature 561, 562, 563, 564, 565, 566, 567, 579, 583, 587: n = A,T,C or G

SEQ ID NO: 1346 - DNA, 18 bp, Oreochromis niloticus
aaagcacccagatgttca

SEQ ID NO: 1347 - DNA, 21 bp, Oreochromis niloticus
gctgctgataattcattcatt

SEQ ID NO: 1348 - DNA, 452 bp, Oreochromis niloticus
agtaagtctgagcaaaactctaaactgactcagaaacaagaagattacacccttagtcctgatactgagtcatgcttgactttttcaaatgcccagtcctgaggacgtcaggttaccttgtagcagagggttgccaggtttgacggagactcctctctgacggctctgatctctgccgccggaaccagagcgaaaacatcctgaaccgtggtggaggagtcgacccagaactgatcccagaacacgtcgtctgaggcttcgacgggctgcaggagaggaaacgcacacaaacatcagtgtgtgtgtgtgtgtgtgtgtgtgtgtgtgtgtgtgttcgacgtgatgagaaaaccaccactgcagctatgactctgtgacttatctgctgctaaacacatcaaatgaaaacagtatgcaacattcatttcattatgactgtgttgatgagaagg

SEQ ID NO: 1349 - DNA, 20 bp, Oreochromis niloticus
tcctctctgacggctctgat

SEQ ID NO: 1350 - DNA, 20 bp, Oreochromis niloticus
ctgcagtggtggttttctca

SEQ ID NO: 1351 - DNA, 593 bp, Oreochromis niloticus
  misc_feature 4, 5, 6, 8, 9, 11, 13, 17, 20, 22, 23, 28, 32, 38, 50, 53,62, 97, 125, 127, 507, 510, 521, 523, 527, 531, 539, 545, 547, 548, 552, 563, 566, 567, 568, 575, 576, 579, 581, 584, 586, 587, 588, 589, 591, 593: n = A,T,C or G
gggnnnanntntntgtncangnnatctnaatntagacncgccccttttgnagntcgaccgtntcgataagcttgatatcgaattcctgcagcccctngaccacgggggctcttctgctccttggngnctagaggaggggggctctcctcgggggatgaacccagcgatgtccccccctccacctccagagcctggagcttctgcagggaactctgcaggcagaagcagaacatgccagacacactggtccagagattaaccaggttccaggcgcagtgtgtgtgtgtgtgtgtgtgtgtgtgtgtgagtgagtgagtgagagagaagaggtggaatgtagggcagtgaggcactgttacaataaaagactccagatattagccagatctctgaaacatcacatgtggaagcacagagcaggggttagtgttcaggaaatagtctgatcccacagtttcaaagcataagtcaatgagcctcccttccaggaattagaccagcaccatncanaaaaacacgtntncctncagntttttcanatattnannatgnggggggatccnctnnnttaaaannggncnccncnnnngngn

SEQ ID NO: 1352 - DNA, 17 bp, Oreochromis niloticus
gaacccagcgatgtccc

SEQ ID NO: 1353 - DNA, 21 bp, Oreochromis niloticus
actaacccctgctctgtgctt

SEQ ID NO: 1354 - DNA, 647 bp, Oreochromis niloticus
  misc_feature 7, 497, 634, 647: n = A,T,C or G
ttatttntaccactatccctttggaagccccaccgcgttggcggccgctctagaactagtggatcccccaaaagccattctttgtgaacttctagtctgcctctgcagagagctttcacacgcttcaaatagctatcagaacagatgatcgagctggataatctccagtatctacagagtctggtatgagcctggcaaaacagcatttgtgaatcactcactcacacacacacacacacacacacacacacacacacacacacacacacacacacacacacacacacacacacacacacacacacacacacacacacacacacacagcttggaataatacacaagacaaactacatttggagactgtcttcataccctgaatcaaaacaccacagtcaaaacatgaaaaaaatgaattattttgggctgcaggaattcgatatcaagcttatcgataccgtcgacctcgagggggggcccggtacccagctttttgntccctttagtgagggttaattgcgcgcttggcgtaatcatggtcatagctgtttcctgtgtgaaattgttattcgctcacaattcacacaacatacgagccggaagcataaaggtgtaaagctggggtgcctatgantgagctaactcan

SEQ ID NO: 1355 - DNA, 21 bp, Oreochromis niloticus
tgaacttctagtctgcctctg

SEQ ID NO: 1356 - DNA, 21 bp, Oreochromis niloticus
gtgttttgattcagggtatga

SEQ ID NO: 1357 - DNA, 620 bp, Oreochromis niloticus; identical to SEQ ID NO: 364
  misc_feature 3, 4, 5, 6, 7, 8, 9, 10, 11, 13, 17, 19, 22, 26, 28, 31,36, 38, 44, 47, 56, 617, 620: n = A,T,C or G

SEQ ID NO: 1358 - DNA, 18 bp, Oreochromis niloticus
agccatccccgtctttct

SEQ ID NO: 1359 - DNA, 21 bp, Oreochromis niloticus
tattttctgtgagcccgtttg

SEQ ID NO: 1360 - DNA, 598 bp, Oreochromis niloticus
  misc_feature 7, 18, 29, 31, 33, 36, 570, 598: n = A,T,C or G
tttgaanccctttggaanccccgcggtgntngncgntctaccactagtggatcccccaaacttttacacttcttgcaaagaccagactattataagaacagggtaattctcgaaaatccctggctccagttaatcctctgttgttttgccatgatgctgacagagagagagagagagaaagagagagagagagagagtgtgtgtgtgtgtgtgtgtgtaagagagagagagagagagcgagagtgaatgacaaaaggcttgtgtaggtttcaacagggtaaatgaatgagaacataaggcttcggttttattacccaaattatgttctggaaagttaaagtgtgtcacgtgtcatcactaactatgaagttgtataagtaatacatgcttggtgttgtatataatacatttatactaaaagccttttgccttgttattcaaatctgttggcatattttatccataatccgtgctgtggtttgttgttgctgaggtatcttccctcagagaggaggtgtctgagttgcagcgagcattgcatgggctttgtgttacaaattggttccttgntaatgatacttcatttgcctttcatctn

SEQ ID NO: 1361 - DNA, 19 bp, Oreochromis niloticus
tggctccagttaatcctct

SEQ ID NO: 1362 - DNA, 21 bp, Oreochromis niloticus
tctcattcatttaccctgttg

SEQ ID NO: 1363 - DNA, 142 bp, Oreochromis niloticus; identical to SEQ ID NO: 365

SEQ ID NO: 1364 - DNA, 26 bp, Oreochromis niloticus
gtactgttacatgaagaaaactctgg

SEQ ID NO: 1365 - DNA, 21 bp, Oreochromis niloticus
tcgtaggaacagcaaagatgc

SEQ ID NO: 1366 - DNA, 193 bp, Oreochromis niloticus
atcaattgtagctgtctaacttggtttatcaaataaaattacaagttgagcaccatttttaaccagtgcttgtttgtgtgtgtgtgtgtgtgtgtgtgtgtgtgtgtgtgtgtgtgtgtgtgttggtctccaggaccctgacagacctgctgaaacagcaggggactgaggtgagctcggtggaaaatgccac

SEQ ID NO: 1367 - DNA, 21 bp, Oreochromis niloticus
gcaccatttttaaccagtgct

SEQ ID NO: 1368 - DNA, 20 bp, Oreochromis niloticus
attttccaccgagctcacct

SEQ ID NO: 1369 - DNA, 584 bp, Oreochromis niloticus; identical to SEQ ID NO: 366
  misc_feature 17, 24, 43, 81, 383, 407, 427, 440, 584: n = A,T,C or G

SEQ ID NO: 1370 - DNA, 21 bp, Oreochromis niloticus
atgatgagagaaagggaaaga

SEQ ID NO: 1371 - DNA, 21 bp, Oreochromis niloticus
cattactgtgcctctgtgaag

SEQ ID NO: 1372 - DNA, 285 bp, Oreochromis niloticus
  misc_feature 198: n = A,T,C or G
cccatgcctccaacacaaccaccgcaacccaccgtcacttatgtcaccagatggacatcaaatgggtaacagtctacgggacagccaccagctatgccaactggctaggctcattatgtttgactgactgagatccgtgcctttgtgtgtgtgtgtgtgtgtgtgtgtgtgtgtgtgtgtgtgtgtgtgtgtgtttgntccagctcctgagggaaatatgtgtgttttataacaacccacatcattatacagtacagccacagcgataacacttcagcatgttgg

SEQ ID NO: 1373 - DNA, 19 bp, Oreochromis niloticus
gccaactggctaggctcat

SEQ ID NO: 1374 - DNA, 21 bp, Oreochromis niloticus
tgctgaagtgttatcgctgtg

SEQ ID NO: 1375 - DNA, 497 bp, Oreochromis niloticus; identical to SEQ ID NO: 367

SEQ ID NO: 1376 - DNA, 20 bp, Oreochromis niloticus
tcttcctcagcccatctgtt

SEQ ID NO: 1377 - DNA, 20 bp, Oreochromis niloticus
caactgttggcagtgacagg

1. An isolated nucleic acid molecule, comprising a single nucleotide polymorphism (SNP) selected from the group consisting of:
(a) a nucleic acid molecule designated SEQ ID NOS: [ ]; and
(b) a nucleic acid molecule that hybridizes to the nucleic acid molecule of (a) or its complement under highly stringent hybridization conditions.

2. An isolated oligonucleotide comprising at least 17 contiguous nucleotides of the nucleotide sequence set forth as SEQ ID NOS: [ ], or the complement thereof.

3. The isolated oligonucleotide of claim 2, labeled with a detectable marker.

4. A primer pair suitable for use in the polymerase chain reaction (PCR), comprising two oligonucleotides according to claim 2.

5. The primer pair of claim 4, wherein said oligonucleotides are selected from the group consisting of SEQ ID NOS: [ ] and [ ], SEQ ID NOS: [ ] and [ ], . . . and SEQ ID NOS: [ ] and [ ].

6. An isolated nucleic acid molecule, comprising a single nucleotide polymorphism (SNP) selected from the group consisting of:
(a) a nucleic acid molecule designated SEQ ID NOS: [ ]; and
(b) a nucleic acid molecule that hybridizes to the nucleic acid molecule of (a) or its complement under highly stringent hybridization conditions.

7. An isolated oligonucleotide comprising at least 17 contiguous nucleotides of the nucleic acid molecule set forth as SEQ ID NOS: [ ], or the complement thereof.

8. The isolated oligonucleotide of claim 7, labeled with a detectable marker.

9. A primer pair suitable for use in the polymerase chain reaction (PCR), comprising two oligonucleotides according to claim 7.

10. The primer pair of claim 9, wherein said oligonucleotides are selected from the group consisting of SEQ ID NOS: [ ] and [ ], SEQ ID NOS: [ ] and [ ], . . . and SEQ ID NOS: [ ] and [ ].

11. A method for detecting a nucleic acid molecule comprising a single nucleotide polymorphism in a sample, comprising contacting said sample containing nucleic acids with one or more oligonucleotides according to claims 2 or 7, wherein said contacting is effected under high stringency hybridization conditions, and identifying a nucleic acid that hybridizes to said oligonucleotide.

12. A method for detecting a nucleic acid molecule comprising a single nucleotide polymorphism in a sample, comprising contacting said sample with the primer pair of claim 4 or 9, amplifying a nucleic acid molecule using polymerase chain reaction, and detecting said amplification.

13. An isolated nucleic acid molecule, comprising a microsatellite sequnce selected from the group consisting of:
(a) a nucleic acid molecule designated SEQ ID NOS: [ ]; and
(b) a nucleic acid molecule that hybridizes to the nucleic acid molecule of (a) or its complement under highly stringent hybridization conditions.

14. An isolated oligonucleotide comprising at least 17 contiguous nucleotides of the nucleic acid molecule set forth as SEQ ID NOS: [ ], or the complement thereof.

15. The isolated oligonucleotide of claim 14, labeled with a detectable marker.

16. A primer pair suitable for use in the polymerase chain reaction (PCR), comprising two oligonucleotides according to claim 14.

17. The primer pair of claim 16, wherein said oligonucleotides are selected from the group consisting of SEQ ID NOS: [ ] and [ ], SEQ ID NOS: [ ] and [ ], and SEQ ID NOS: [ ] and [ ].

18. An isolated nucleic acid molecule, comprising a microsatellite sequence selected from the group consisting of:
(a) a nucleic acid molecule designated SEQ ID NOS: [ ]; and
(b) a nucleic acid molecule that hybridizes to the nucleic acid molecule of (a) or its complement under highly stringent hybridization conditions.

19. An isolated oligonucleotide comprising at least 17 contiguous nucleotides of the nucleic acid molecule set forth as SEQ ID NOS: [ ], or the complement thereof.

20. The isolated oligonucleotide of claim 19, labeled with a detectable marker.

21. A primer pair suitable for use in the polymerase chain reaction (PCR), comprising two oligonucleotides according to claim 19.

22. The primer pair of claim 21, wherein said oligonucleotides are selected from the group consisting of SEQ ID NOS: [ ] and [ ], SEQ ID NOS: [ ] and [ ], . . . and SEQ ID NOS: [ ] and [ ].

23. An isolated nucleic acid molecule, comprising a microsatellite sequence selected from the group consisting of:
(a) a nucleic acid molecule designated SEQ ID NOS: [ ]; and
(b) a nucleic acid molecule that hybridizes to the nucleic acid molecule of (a) or its complement under highly stringent hybridization conditions.

24. An isolated oligonucleotide comprising at least 17 contiguous nucleotides of the nucleic acid molecule set forth as SEQ ID NOS: [ ] to [ ], or the complement thereof.

25. The isolated oligonucleotide of claim 24, labeled with a detectable marker.

26. A primer pair suitable for use in the polymerase chain reaction (PCR), comprising two oligonucleotides according to claim 24.

27. The primer pair of claim 26, wherein said oligonucleotides are selected from the group consisting of SEQ ID NOS: [ ] and [ ], SEQ ID NOS: [ ] and [ ], . . . and SEQ ID NOS: [ ]-[ ].

28. An isolated nucleic acid molecule, comprising a microsatellite sequence selected from the group consisting of:
(a) a nucleic acid molecule designated SEQ ID NOS: [ ]; and
(b) a nucleic acid molecule that hybridizes to the nucleic acid molecule of (a) or its complement under highly stringent hybridization conditions.

29. An isolated oligonucleotide comprising at least 17 contiguous nucleotides of the nucleic acid molecule set forth as SEQ ID NOS: [ ], or the complement thereof.

30. The isolated oligonucleotide of claim 29, labeled with a detectable marker.

31. A primer pair suitable for use in the polymerase chain reaction (PCR), comprising two oligonucleotides according to claim 29.

32. The primer pair of claim 31, wherein said oligonucleotides are selected from the group consisting of SEQ ID NOS: [ ] and [ ], SEQ ID NOS: [ ] and [ ], and SEQ ID NOS: [ ]-[ ].

33. An isolated nucleic acid molecule, comprising a microsatellite sequence selected from the group consisting of:
(a) a nucleic acid molecule designated SEQ ID NOS: [ ]; and
(b) a nucleic acid molecule that hybridizes to the nucleic acid molecule of (a) or its complement under highly stringent hybridization conditions.

34. An isolated oligonucleotide comprising at least 17 contiguous nucleotides of the nucleic acid molecule set forth as SEQ ID NOS: [ ], or the complement thereof.

35. The isolated oligonucleotide of claim 34, labeled with a detectable marker.

36. A primer pair suitable for use in the polymerase chain reaction (PCR), comprising two oligonucleotides according to claim 34.

37. The primer pair of claim 36, wherein said oligonucleotides are selected from the group consisting of SEQ ID NOS: [ ] and [ ], SEQ ID NOS: [ ] and [ ], and SEQ ID NOS: [ ]-[ ].

38. A method for detecting a nucleic acid molecule comprising a microsatellite sequence in a sample, comprising contacting said sample containing nucleic acids with one or more oligonucleotides according to claims 14, 19, 24, 29, or 34, wherein said contacting is effected under high stringency hybridization conditions, and identifying a nucleic acid that hybridizes to said oligonucleotide.

39. A method for detecting a nucleic acid molecule comprising a microsatellite sequence in a sample, comprising contacting said sample with the primer pair of claims 16, 21, 26, 31, or 36, amplifying a nucleic acid molecule using polymerase chain reaction, and detecting said amplification.

40. A method of determining the population of origin of a fish sample comprising the steps of:
(a) providing an origin genotype database comprising a collection of candidate parent genotypes, wherein each of said candidate parent genotypes represents a distinct population of origin; and
(b) comparing a sample genotype to said candidate parent genotypes, wherein a match between said sample genotype and one of said candidate parent genotypes identifies the population of origin of said sample.

41. A method of determining the origin of a fish sample comprising the steps of:
(a) providing an origin genotype database comprising a collection of candidate genotype profiles, wherein each of said candidate genotype profiles represents a distinct population of origin; and
(b) comparing a sample genotype to said candidate genotype profiles, wherein a match between said sample genotype and one of said candidate genotype profiles identifies the population of origin of said sample.

42. A method of determining the origin of a fish sample comprising the steps of:
(a) providing a parentage genotype database comprising a collection of candidate parent genotypes, wherein each of said candidate parent genotypes represents a distinct origin; and
(b) comparing a sample genotype to said parentage genotype database, wherein a match between said sample genotype and one of said candidate parent genotypes identifies the origin of said sample.

43. The method of claim 42, wherein said parentage genotype database comprises every potential origin genotype.

44. The method of claim 42, wherein said candidate parent genotypes comprise two or more distinct species.

45. The method of claim 42, wherein said sample and candidate parent genotypes belong to the family Salmonidae.

46. The method of claim 42, wherein said sample and candidate parent genotypes belong to the species Salmo salar.

47. The method of claim 42, wherein said sample and candidate parent genotypes belong to the genus tilapia.

48. The method of claim 47, wherein said sample and candidate parent genotypes belong to the species Oreochromis niloticus.

49. The method of claim 42, further comprising sample and candidate parent genotypes belonging to a species selected from the group consisting of rainbow trout, halibut, seabass and Atlantic cod.

50. The method of claim 42, further comprising the initial steps of:
(a) extracting nucleic acid corresponding to each of said distinct populations of origin ; and
(b) genotyping the extracted nucleic acid with selected genetic markers to obtain said collection of candidate parent genotypes.

51. The method of claim 50, wherein said nucleic acid is extracted from broodstock individuals.

52. The method of claim 50, wherein said genetic markers are selected from the group consisting of single nucleotide polymorphisms (SNPs), microsatellites, restriction length polymorphisms (RFLPs), amplified fragment length polymorphisms (AFLP), random amplified polymorphic DNA (RAPD), mitochondrial DNA.

53. The method of claim 52, wherein said genetic markers comprise SNPs.

54. The method of claim 53, wherein said SNPs comprise SEQ ID NOS: [ ].

55. The method of claim 53, wherein said SNPs comprise SEQ ID NOS: [ ].

56. The method of claim 53, further comprising identifying said SNPs by performing an oligonucleotide ligation assay (OLA).

57. The method of claim 53, further comprising identifying said SNPs by performing a hybridization assay.

58. The method of claim 57, wherein said hybridization assay is performed on a DNA chip.

59. The method of claim 42, wherein the absence of said match excludes said candidate genotypes as the origin of said sample.

60. The method of claim 42, further comprising generating a central database capable of storing said population of candidate parent genotypes.

61. The method of claim 42, wherein said central database is capable of instantaneously comparing said sample genotype to said collection of candidate parent genotypes.

62. The method of claim 61, wherein said central database of candidate parent genotypes is on the accessible through the internet.
